(19) United States
(12) Patent Application Publication
(10) Pub. No.: US 2014/0087362 A1
(43) Pub. Date: Mar. 27, 2014

(54) Methods for assessing effectiveness and monitoring oncolytic virus treatment

(71) Applicants: Aladar A. Szalay, Highland, CA (US); Nanhai G. Chen, San Diego, CA (US); Huiqiang Wang, San Diego, CA (US); Melody Fells, San Diego, CA (US); Albert Roeder, Bernried (DE); Qian Zhang, San Diego, CA (US); Boris Minev, San Diego, CA (US)

(72) Inventors: Aladar A. Szalay, Highland, CA (US); Nanhai G. Chen, San Diego, CA (US); Huiqiang Wang, San Diego, CA (US); Melody Fells, San Diego, CA (US); Albert Roeder, Bernried (DE); Qian Zhang, San Diego, CA (US); Boris Minev, San Diego, CA (US)

(21) Appl. No.: 13/815,727

(22) Filed: Mar. 13, 2013

Related U.S. Application Data
(60) Provisional application No. 61/690,468, filed on Jun. 26, 2012.
(60) Provisional application No. 61/685,367, filed on Mar. 16, 2012.

(51) Int. Cl. C12Q 1/70

(52) U.S. Cl. CPC C12Q 1/701
USPC 435/5; 530/389.4; 530/327; 530/387.9

(57) ABSTRACT

Diagnostic methods for in vivo and ex vivo detection of circulating tumor cells (CTCs) for the diagnosis and treatment of cancer are provided. The diagnostic methods employ oncolytic viruses alone or in combination with one or more tumor cell enrichment and/or detection methods. Combinations and kits for use in the practicing the methods also are provided.

### RELATED APPLICATIONS

[0001] Benefit of priority is claimed to U.S. Provisional Application Ser. No. 61/690,468, filed Jun. 26, 2012, to Aladar A. Szalay, Nanhai G. Chen, Huiqiang Wang, Melody Fells, Albert Roeder, Qian Zhang and Boris Minev entitled “METHODS FOR ASSESSING EFFECTIVENESS AND MONITORING ONCOLYTIC VIRUS TREATMENT,” and to U.S. Provisional Application Ser. No. 61/685,367, filed Mar. 16, 2012, to Aladar A. Szalay, Nanhai G. Chen, Huiqiang Wang and Melody Fells, entitled “METHODS FOR ASSESSING EFFECTIVENESS AND MONITORING ONCOLYTIC VIRUS TREATMENT.”

[0002] This application is related to International PCT Application No. (Attorney Dkt. No. 33316-4833PC), filed Mar. 13, 2013, entitled “METHODS FOR ASSESSING EFFECTIVENESS AND MONITORING ONCOLYTIC VIRUS TREATMENT,” which also claims priority to U.S. Provisional Application Ser. Nos. 61/685,367 and 61/690,468. The subject matter of each of the above-noted applications is incorporated by reference in its entirety.

### INCORPORATION BY REFERENCE OF SEQUENCE LISTING PROVIDED ON COMPACT DISCS

[0003] An electronic version on compact disc (CD-R) of the Sequence Listing is filed herewith in duplicate (labeled Copy 1 and Copy 2), the contents of which are incorporated by reference in their entirety. The computer-readable file on each of the aforementioned compact discs, created on Mar. 11, 2013, is identical, 3.93 MB in size, and titled 4833SEQ.001.txt.

### FIELD OF INVENTION

[0004] Diagnostic methods for in vivo and ex vivo detection of circulating tumor cells for the diagnosis and treatment of cancer are provided. The diagnostic methods employ oncolytic viruses alone or in combination with one or more tumor cell enrichment methods. Combinations and kits for use in the practicing the methods also are provided.

### BACKGROUND

[0005] Most cancer deaths result from the metastatic spread of cancer in which tumor cells escape from the primary tumor and relocate to distant sites (Talmadge et al. (2010) AACR Cancer Res 70(14):5649-5669). Metastatic tumor cells found in body fluids, such as blood, lymphatic, cerebrospinal and ascitic fluids are biomarkers for evaluating cancer prognosis and for monitoring therapeutic response. Also, prevention and elimination of such metastatic tumor cells can increase survival rates and time. Metastatic tumor cells in the peripheral blood (i.e. circulating tumor cells (CTCs)), are prognostic biomarkers for solid tumors, including non-small cell lung cancer, breast cancer, colorectal cancer and prostate cancer (see, e.g., Balic et al. (2012) Expert Rev Mol Diagn 12(3):303-312; and van de Stolpe et al. (2011) Cancer Res 71(18):5955-5960). There are few methods for effective detection of CTCs.

[0006] Oncolytic viral therapy is effected by administering a virus that accumulates in tumor cells and replicates in the tumor cells. By virtue of replication in the cells, and optional delivery of therapeutic agents, treatment is effected because tumor cells are lysed resulting in shrinkage of the tumor, the optional therapeutic protein is expressed, which can treat the tumor, and other effects, such as antibody responses to released tumor antigens effect treatment.

[0007] It, however, can take months to observe results of treatment, and a plurality of treatments may be needed. Thus, it may be months, to know whether the oncolytic therapy is effective. If it is not effective, alternative therapies can be tried, whose effectiveness can be defeated by any delay in treatment. If it can be determined within a few weeks of initiating oncolytic therapy whether the therapy is not likely to be effective, an alternative therapy can be initiated earlier.

[0008] Hence, there is a need for a method or protocol to monitor oncolytic therapy, including determining whether a particular oncolytic therapy is effective. In addition, there is a need for diagnostic methods to stratify patients for responsiveness to cancer treatments in order to avoid delays in treatment and provide necessary modifications to ineffective therapeutic regimens. In addition, there is a need for the development of comprehensive, sensitive, and specific methods for detecting CTC detection.

### SUMMARY

[0009] Oncolytic viruses effect treatment by colonizing or accumulating in tumor cells and replicating. They provide an effective weapon in the tumor treatment arsenal. In some instances, a particular virus may not be effective for treating a particular tumor. It, however, is difficult to assess or early in treatment whether a virus is effective. A change in tumor or size or a decrease in metastasis may not be detectable for months after treatment; valuable time can be lost waiting to assess whether a virus is effective or whether a different virus could be more effective.

[0010] Provided herein are methods for detecting tumor cells in a body fluid. The methods herein employ oncolytic viruses that encode reporters for detection of the viruses to detect the tumor cells. In some embodiments, the oncolytic virus is administered to a subject, a body fluid sample is obtained at a pre-determined time after administration or at intervals thereafter, and virus is detected in cells in the sample. Since oncolytic viruses accumulate in tumor cells, the detected cells will be tumor cells. The timing of sampling and detection depends upon the application. Also, the tumor cells in the sample can be enriched by methods known in the art.

[0011] The ability to detect tumor cells, particular viable, not dead or dying tumor cells, in a body fluid can be employed in a variety of applications, particularly those that provide an indication of the status or stage of a tumor, regression of a tumor, remission, recurrence, effectiveness of treatment and other such parameters. The applications include methods for assessing the potential efficacy of treatment of a tumor with a particular oncolytic virus in which detection of infected tumor cells in body fluids following systemic administration is indicative that the viral therapy will infect and replicate in tumor cells; methods for monitoring progression of treatment, where an effective treatment results in a decrease in infected tumor cells over time, detection of metastatic disease, and other such methods, particularly any methods in which detection of circulating tumor cells is employed. It is shown herein that the tumor cells, such as circulating tumor cells (CTCs) that are detected appear to be live (viable) tumor cells; whereas methods that rely on other properties of CTCs, such as tumor markers, detect CTCs, but detect dead or dying cells as well as living, viable cells. Such methods will not provide an accurate picture of the status of tumor development, metastasis, and/or treatment.

[0012] Hence, provided herein are methods for assessing or predicting whether a particular treatment or treatment regimen is having an effect relatively soon, typically within a week or two after initiating treating. In addition, provided are methods for detection and/or enumeration of live tumor cells in preclinical and clinical liquid biopsies The methods herein also have other applications as described herein. In particular, shortly after administration of an oncolytic virus, such as within a day and before about 24 or at 24 days, the presence of virus in tumor cells in a body fluid indicates that the virus has infected tumors and tumor cells and/or is present in tumor cells released from tumors. The presence of virus thus indicates that the treatment should be continued. The absence of virus indicates that virus likely is not effectively infecting tumors or replicating, and treatment should be discontinued. After treatment has been ongoing, then the methods herein can be used to monitor treatment. Once viral infection of tumor cells and replication therein has been established, then, the numbers of tumor cells detected should decrease over time as the treatment eliminates tumor cells.

[0013] Provided herein are methods for monitoring efficacy of treatment with an oncolytic virus by testing a body fluid sample, such as but not limited to, blood, plasma, urine and cerebral spinal fluid, from a subject to whom an oncolytic virus has been administered. The virus includes, or is modified, such as by including a reporter protein or protein that induces a detectable signal, so that the virus is detectable (i.e., is an oncolytic reporter virus). If the virus has colonized or infected and is replicating in tumors in the subject, it is shown herein tumor cells that are released into circulation from the tumors will contain virus and are detectable within a short time, such as 1, 2, 3, 4, 5, 6, 7, 8, 9, 10, 12, 14, 16, 18, 20, 22, 24 days (before tumor shrinkage or disease remission or stabilization can be reliably detected) after administration. Detection of the oncolytic reporter virus in the sample indicates that tumor cells in the sample contain the virus, which indicates that the virus is likely or will or is effective against the tumor in that it has infected tumor cells and has replicated sufficiently to be detectable. Suitable controls can be employed for comparison. Also, samples can be obtained/monitored over time, such as daily or other suitable periods, to detect virus. If virus is detected, particularly at a level above a control, such as the level immediately after treatment or compared to an established standard, it can be concluded the virus is going to have an ameliorative effect. The virus that is administered to a subject, typically is administered at a therapeutically effective dosage, but a lower dosage can be administered in order to assess whether the virus is suitable for treatment of a particular tumor or particular subject, before administering a therapeutic dosage. Subjects include any mammal, particularly humans, but also include other mammals, including but not limited to, domesticated animals and wild animals, such as pets and zoo animals. Hence, the methods herein have veterinary applications.

[0014] Hence provided are methods in which a body fluid sample is tested to detect virus. Testing typically is performed at a pre-determined time or periodically following administration of the virus. Detection of virus, indicates that the tumor cells are infected, which is indicative that the treatment is or will be efficacious. Testing typically is performed on a body fluid sample in vitro after obtaining or providing the body fluid sample from a subject. Also, testing can be effected by obtaining a body fluid sample from a subject and contacting the sample with virus to assess whether the virus infects any tumor cells in the sample. Generally, prior to testing the body fluid sample, administering the oncolytic reporter virus to the subject. As noted, the oncolytic virus can be administered at therapeutic dosages or it at a dosage sufficient to be detected that is lower than a treatment dosage. Exemplary dosage ranges are selected from among, 1×10² pfu to 1×10⁸ pfu, or is administered in an amount that is at least or at least about or is or is about 1×10² pfu, 1×10³ pfu, 1×10⁴ pfu, 1×10⁵ pfu, 1×10⁶ pfu, 1×10⁷ pfu, 1×10⁸ pfu, 1×10⁹ pfu, 1×10¹° pfu, 1×10¹¹ pfu, 1×10¹² pfu or higher. Other exemplary ranges can be selected from among 1×10⁶ pfu to 1×10¹⁴ pfu, or is administered in an amount that is at least or at least about or is or is about 1×10⁸ pfu, 1×10⁹ pfu, 1×10¹° pfu, 1×10¹¹ pfu, 1×10¹² pfu, 1×10¹³ pfu, or 1×10¹⁴ pfu. Dosage depends upon the particular oncolytic virus employed and protocols therefor, and can be determined by a skilled practitioner as needed. If it is determined that a particular virus is likely to be effective or is effective, the reporter gene can be inactivated, removed or replaced or the virus can be used with the reporter. Thus, if the treatment is efficacious as evidenced by the presence of detectable virus in the sample or presence at a level determined to be so-indicative, such as at level greater than within 24 hours after initiating treatment, continuing treatment of the subject by administering an oncolytic virus for treatment, wherein the oncolytic virus is the same oncolytic reporter virus or is an oncolytic virus where the reporter gene is not present or is replaced with a different heterologous nucleic acid. It is understood, that early on in treatment levels of detectable virus in a body fluid should increase. As treatment proceeds, levels of virus, particularly virus in viable cells, ultimately should decrease. Monitoring can be performed throughout the course of treatment to assess effectiveness and/or to monitor the progress of treatment. As treatment progresses, detectable virus should decrease in body fluid samples.

[0015] For practicing any of the methods provided herein, the sample can be treated to enrich the concentration or amount of tumor cells to produce an enriched sample prior to testing the sample. Tumor cells also can be isolated for detection. Methods for enriching and/or isolating are well known to those of skill in the art.

[0016] Methods for detecting a tumor cell in a body fluid sample are provided. These methods include: a) enriching tumor cells in a body fluid sample from a subject administered with an oncolytic reporter virus to produce an enriched sample; and b) testing the enriched sample for tumor cells that are infected with the oncolytic virus by detecting the oncolytic reporter virus in the sample, thereby detecting tumor cells in the sample. In the methods, wherein enriching tumor cells in a body fluid sample can be effected after obtaining or providing the body fluid sample from a subject. Generally the oncolytic reporter virus is administered prior to enriching tumor cells in a body fluid sample or obtaining the body fluid sample, administering an oncolytic reporter virus to the subject. Embodiments are provided in which the virus is contacted with the sample, typically, after enriching, rather than administering it to the subject.

[0017] For all methods herein, as noted above, the oncolytic reporter virus can be administered at a therapeutic dosage or at a lower dosage sufficient to be detected if the virus colonizes and replicates in tumors that is lower than a treatment dosage. Such dosages, include, for example, 1×10² pfu to 1×10⁸ pfu, or is or is about 1×10² pfu, 1×10³ pfu, 1×10⁴ pfu, 1×10⁵ pfu, 1×10⁶ pfu, 1×10⁷ pfu or 1×10⁸ pfu. The oncolytic reporter virus can be administered to the subject in an amount for treatment of a tumor or cancer, such as, for example, but not limited to, 1×10⁶ pfu to 1×10¹⁴ pfu, or is administered in an amount that is at least or at least about or is or is about 1×10⁶ pfu, 1×10⁷ pfu or 1×10⁸ pfu, 1×10⁹ pfu, 1×10¹⁰ pfu, 1×10¹¹ pfu, 1×10¹² pfu, 1×10¹³ pfu, or 1×10¹⁴ pfu. As noted, dosage depends upon the particular oncolytic virus, the subject, the type of tumor(s) and other parameters. If necessary, the skilled practitioner can determine an appropriate dosage.

[0018] In these methods, detecting tumor cells can be performed to monitor treatment (or to assess continued efficacy of treatment) of the subject. The amount or level of detected tumor cells is compared to a control sample, such as a predetermined standard, or compared to samples from the subject earlier in time or over time, as an indicator of the progress of treatment. Generally, initially there will be an increase in virus detected, indicating colonization and replication of virus, and, then as treatment progresses, the level or amount can level off or decrease as the virus stabilizes or eliminates tumors or tumor cells.

[0019] In practicing the methods, treatment can be modified in accord with the results achieved. For example, early on in treatment, if infected tumor cells in the sample are substantially the same or increased compared to a control, then the treatment can be continued or accelerated; if infected tumor cells in the sample are reduced compared to a control, then the treatment is reduced or discontinued; and if no infected tumor cells are detected, then the treatment is discontinued. As noted, but after treatment has been shown to be effective, then the goal is to eliminate detectable tumor cells in a sample. Controls for this method as well as the other methods provided herein, for example include, but are not limited to, predetermined standards, a sample from a healthy subject, a baseline sample from the subject prior to treatment or immediately following with the oncolytic virus, is a sample from a subject after a previous dose, or is a sample from a subject prior to the last dose of oncolytic virus. Alternatively, for monitoring treatment, samples can be tested over time to assess the levels or to detect virus in cells. As noted, the level of cells initially should increase as the virus infects/colonizes tumors and/or tumor and replicates, but then the levels should decrease or level off as the virus eradicates tumor cells. Typically, the control sample is the same type of bodily fluid sample as the tested sample. In practicing the methods the body fluid sample is tested at a pre-determined time following administration of the virus. The predetermined time should be sufficient for the virus to infect a tumor cell and replicate in the tumor or tumor cell in the subject. The predetermined time can be long enough for free virus, such as virus administered intravenously, to clear from non-tumor tissues. It is not necessary for such to occur, since comparison with an appropriate control can eliminate inclusion of such background or baseline levels of virus. The predetermined time for assessing efficacy or monitoring therapy can be at 6 more hours after administration of the initial dosage of the virus. Generally for monitoring efficacy, it is less than one month or less than about a month following administration of the virus. For monitoring therapy, it can be performed throughout the course of therapy and subsequent to therapy, since the presence of any tumor cells in body fluids can be an indicator that the tumor is disseminating or metastasizing. In addition, the presence of tumor cells in the body fluid can be indicative of the recurrence of a tumor. These cells can be detected early in the progress of such recurrence permitting early detection. In addition, the methods provided herein, also can be used to detect or diagnose cancer or a tumor.

[0020] For practicing the methods, the predetermined time can be at least or no more than 6 hours, 12 hours, 18 hours, 1 day, 2 days, 3 days, 4 days, 5 days, 6 days, 7 days, 8 days, 9 days, 10 days, 11 days, 12 days, 13 days, 14 days, 15 days, 16 days, 17 days, 18 days, 19 days, 20 days, 21 days, 22 days, 23 days or 24 days following administration of the virus. A body fluid sample is obtained a plurality of times at successive time points following administration of the virus, whereby a plurality of samples are obtained from the subject. A body fluid sample can be assessed at a predetermined time or times after each successive administration of the virus in a cycle of administration.

[0021] Provided are methods for detecting a tumor cell in a body fluid sample in which a body fluid sample from a subject is tested by: a) enriching tumor cells from the sample to produce an enriched sample; b) contacting tumor cells from the sample with an oncolytic reporter virus; and c) detecting the oncolytic reporter virus, thereby detecting tumor cells in the sample. Detecting tumor cells in a sample indicates that the oncolytic virus is a candidate for treatment of the tumor and/or indicates that the subject is a candidate for treatment with the oncolytic virus.

[0022] The methods herein also can be adapted or employed for prognosing a cancer. The stage of a cancer can be determined. Also, the presence of and/or level of cancer stem cells, which cells have been associated with a poorer prognosis can be detected/determined. Exemplary of such methods is method in which a body fluid sample from a subject by is obtained. The sample can be contacted with an oncolytic reporter virus, or the oncolytic virus can be administered to the subject and then the body fluid sample obtained. The presence of cancer stem cells can be identified by: i) detecting the oncolytic reporter virus to identify cells infected with the virus and from the identified cells identifying stem cells; and/or ii) identifying stem cells and from among the identified stem cells identifying cells infected with virus, whereby the presence of cancer stem cells is indicative of the presence of an aggressive cancer. Stem cells can be identified by methods known to those of skill in the art. For example, stem cells can be identified by detecting a stem cell marker, such as, for example, expression of aldehyde dehydrogenase (ALDH1). The method optionally includes enriching tumor cells in the sample to produce an enriched sample. Contacting cells with an oncolytic reporter virus in embodiments in which virus is contacted with the sample in vivo, can be performed before or after enriching tumor cells from the sample. When it is performed prior to enriching the tumor cells from the sample, the sample can be contacted with the virus at least or at 0.5, 1, 2, 3, 4, 5, 6, 7, 8, 9, 10, 12, 14, 16, 18, 20, 22, or 24 hours prior to enriching the tumor cells. Virus is contacted with cells at a suitable multiplicity of infection (moi), such as at least about or at 0.00001 to 10.0, 0.01 to 10, and 0.0001 to 1.0, or any suitable or empirically determined moi. The methods for detecting tumor cells can include treatment of the subject from whom a sample is obtained by administering an oncolytic virus for treatment of the subject. This includes oncolytic virus that is the same oncolytic reporter virus or is an oncolytic virus where the reporter gene is not present or is replaced by a different heterologous nucleic acid. Dosages are as noted above.

[0023] In connection with all methods provided herein, the oncolytic virus can be administered at least one time over a cycle of administration or several times and for a single cycle and a plurality of cycles. For example, in some instances, such as administration of LIVP, including the exemplary virus GLV-1h68 (having a genome set forth in SEQ ID NO:1), the oncolytic virus is administered in an amount that is at least 1×10⁹ pfu at least one time over a cycle of administration. A cycle of administration can be at least or is two days, three days, four days, five days, six days, seven days, 14 days, 21 days or 28 days. In each cycle, the amount of virus is administered two times, three times, four times, five times, six times or seven times over the cycle of administration. Exemplary of cycles, the virus can be administered on the first day of the cycle, the first and second day of the cycle, each of the first three consecutive days of the cycle, each of the first four consecutive days of the cycle, each of the first five consecutive days of the cycle, each of the first six consecutive days of the cycle, or each of the first seven consecutive days of the cycle.

[0024] For the methods herein, enriching tumor cells from the sample include selecting tumor cells from the sample or removing non-tumor cells from the fluid sample. Exemplary enrichment can remove about 10%, 20%, 30%, 40%, 50%, 60%, 70%, 80%, 90%, 95%, 96%, 97%, 98%, 99% of non-tumor cells from the sample or can retain at least 50%, 60%, 70%, 80%, 90%, 95%, 96%, 97%, 98%, 99% of tumor cells from the sample. For example, in an embodiment, the sample can be a blood sample, and enriching tumor cells is effected by a method that includes lysis of erythrocytes in the sample. Enriching tumors can be effected by any method known to those of skill in the art. These methods include, but are not limited to, capturing or selecting cells based upon larger size, shear modulus, increased stiffness, reduced deformability, increased density, expression of a surface moiety or moieties or other markers.

[0025] Methods of enriching tumor cells include, for example, separating tumor cells from non-tumor cells with a device adapted to sort or separate cells based on physical properties. These include, for example, microfluidic devices, microfilters, density gradients for separation, immunomagnetic separation methods and acoustophoresis. A plurality of methods can be employed. Microfluidic devices can include isolation wells or loci, such as in an array. Each well or locus can include: a cell trap that prevents the passage of tumor cells and permits the passage of non-tumor cells and other components of the fluid sample; or a cell trap that prevents the passage of non-tumor cells and permits the passage of tumor cell in the fluid sample. Separation in a microfluidic device or other suitable device or medium can separate tumor cells based on deformability, size or stiffness. An exemplary microfluidic device contains one or more linear channels, where: each linear channel has a length and a cross-section of a height and a width defining an aspect ratio adapted to isolate tumor cells along at least one portion of the cross-section of the channel based on reduced deformability or larger size of tumor cells as compared to non-tumor cells; and tumor cells flow along a first portion of the channel to a first outlet and non-tumor cells flow along a second portion of the channel to a second outlet.

[0026] Enriching can be effected by separation from non-tumor cells based on expression of a moiety on the tumor cell surface, such as chip or bead that contains an immobilized capturing agent that binds to a moiety on a tumor cell surface moiety, such as, but are not limited to, cytokeratin, epithelial cell adhesion molecule (designated EpCAM) or other tumor antigen or marker. Capturing agents include, but are not limited to, an antibody, an antibody fragment, a receptor or a ligand binding domain. Exemplary of such capturing agents are anti-tumor antibodies, such as an anti-EpCAM antibody and antigen binding fragments thereof. Enrichment can be effected by processing the sample through a microfilter, such as a microfilter that contains a plurality, such as an array, of pores of a predetermined shape and size.

[0027] In some examples, the capturing agent is immobilized, such as on a solid support, such as a solid support described herein, including a magnetic bead, and enrichment is effected by separating the solid support from the sample. Capturing agents also include, for example, antibodies and antigen-binding fragments thereof that immunospecifically bind to a protein expressed on the surface of the tumor cell. In some examples, the capturing agent binds to a protein encoded by the oncolytic virus and expressed on the surface of a cell infected by the virus.

[0028] In some examples, the protein encoded by the oncolytic virus is a cell surface protein, including but not limited to, transporter proteins. Exemplary transporter proteins that can be encoded by the viruses provided herein are listed elsewhere herein and include, for example, a norepinephrine transporter (NET) and a sodium iodide symporter (NIS). Exemplary viruses that encode the human norepinephrine transporter (hNET) include, but are not limited to, GLV-1h99, GLV-1h100, GLV-1h101, GLV-1h139, GLV-1h146 and GLV-1h150 (see, e.g., U.S. Patent Publication No. US-2009-0117034). Exemplary viruses provided herein that encode the human sodium iodide symporter (hNIS) include, but are not limited to, GLV-1h151, GLV-1h152 and GLV-1h153 (see, e.g., U.S. Patent Publication No. US-2009-0117034). All are derivatives of GLV-1h68.

[0029] GLV-1h151, GLV-1h151 and GLV-1h153 encode hNIS under the control of a vaccinia synthetic early promoter, vaccinia synthetic early/late promoter or vaccinia synthetic late promoter, respectively, in place of the gusA expression cassette at the HA locus in GLV-1h68. For example, the capturing agent, including, for example antibodies and antigen-binding fragments thereof provided herein, binds to the extracellular domain of NIS.

[0030] Provided are antibodies and antigen-binding fragments thereof that immunospecifically bind to the extracellular domain of NIS. In some examples, an antibody provided herein that binds to the extracellular domain of NIS binds to an amino acid sequence within a region of NIS having the sequence RGVMLVGGPRQVLTLAQNHSRINLMDFNPDPRSR (SEQ ID NOS: 50), YPPSEQTMRVLPSSAARCVALSVNASGLLDPALLPANDSSRAPSSGMDASRPALADS FYA (SEQ ID NO: 51), NHSRINLMDFNPDP (SEQ ID NO: 52) or PSEQTMRVLPSSAA (SEQ ID NO: 54); or to

an amino acid sequence corresponding to the sequence RGVMLVGGPRQVLTLAQNHSRINLMDFNPDPRSR (SEQ ID NOS: 50), YPPSEQTMRVLPSSAARCVALSVNASGLLDPALLPANDSSRAPSSGMDASRPALADS FYA (SEQ ID NO: 51), NHSRINLMDFNPDP (SEQ ID NO: 52) or PSEQTMRVLPSSAA (SEQ ID NO: 54) in a NIS polypeptide set forth in SEQ ID NO: 46. In some examples, an antibody provided herein that binds to the extracellular domain of NIS can bind to amino acids 225-238, 468-481 or 502-515 of NIS or a region corresponding to amino acids 225-238, 468-481 or 502-515 of a polypeptide set forth in SEQ ID NO: 46.

[0031] Also provided herein are methods for preparing antibodies that bind to the extracellular domain, particular, the portion thereof that can be captured by an antibody of a transporter protein, such as a NIS protein. Methods for preparing antibodies that bind to the extracellular domain of NIS include any methods for preparing antibodies known in the art or described herein. For example, antibodies that bind to the extracellular domain of NIS can be prepared as polyclonal antibodies or monoclonal antibodies.

[0032] Provided are antibodies that specifically binds to the extracellular domain of NIS. In particular, the antibodies bind to cells infected with an oncolytic virus that expresses the NIS protein. Also provided are isolated polypeptides that contain the sequence 238, 468-481 and/or 502-515 of hNIS (SEQ ID NO: 46) but do not comprise the complete extracellular domain of NIS. In particular, provided are such polypeptides that contain residues 225-238, 468-481 or 502-515 of hNIS (SEQ ID NO:46) or a corresponding region in a non-human NIS are provided. Immunizing polypeptides that contain residues 225-238, 468-481 or 502-515 of hNIS or a corresponding region in a non-human NIS conjugated to a hapten for immunization are provided. Antibodies that specifically bind to these polypeptides also are provided.

[0033] Detection of virus in a sample can be effected by any suitable method. The method depends upon the particular reporter selected. Methods, include, but are not limited to those that detect light or electromagnetic radiation, such as, flow cytometry, fluorescence microscopy, fluorescence spectroscopy, magnetic resonance spectroscopy and luminescence spectroscopy.

[0034] For the methods herein, fluid samples the body fluid sample is a sample from blood, lymph, bone marrow fluid, pleural fluid, peritoneal fluid, spinal fluid, abdominal fluid, pancreatic fluid, cerebrospinal fluid, brain fluid, ascites, urine, saliva, bronchial lavage, bile, sweat, tears, ear flow, sputum, semen, vaginal flow, milk, amniotic fluid, or secretions of respiratory, intestinal or genitourinary tract. Exemplary of such samples, is a peripheral blood sample, and a body fluid sample that contains dissociated bone marrow cells from a bone marrow biopsy. The volume of sample is any that is convenient for testing, such as at least about 0.01 mL to about 50 mL or 100 ml.

[0035] For the methods herein, subjects include human and non-human animals, such as an ape, monkey, mouse, rat, rabbit, ferret, chicken, goat, cow, deer, zebra, giraffe, sheep, horse, pig, dog and cat. The subjects to be tested include those known to have cancer and, particularly for methods of detecting tumors, those who are screened for cancer and those suspected of having cancer. Cancers include, but are not limited to, cancer of the lung, breast, colon, brain, prostate, liver, pancreas, esophagus, kidney, stomach, thyroid, bladder, uterus, cervix or ovary. Also included are blood and bone marrow cancers, such leukemias, and solid tumors and both. Included are metastatic cancers.

[0036] Oncolytic virus and oncolytic reporter viruses include any oncolytic virus, such as vaccinia viruses and other pox viruses, vesticular stomatitis virus (VSV), oncolytic adenoviruses and herpes viruses. Exemplary of vaccinia viruses are Lister strain viruses and Wyeth strain viruses and derivatives thereof, such as GLV-1 h68 and derivatives thereof (Genelux Corporation) and JX-594 (Jennerex Biotherapeutics). Lister strain viruses include LIVP and derivatives thereof, such as derivatives that contain nucleic acid encoding a heterologous gene product. The heterologous gene product can be inserted into or in place of a non-essential gene or region in the genome of the virus or in other locus in which it can be expressed without eliminating replication of the virus. For the LIVP strain, loci for insertion, include, but are not limited to, at or in or in place of the hemagglutinin (HA), thymidine kinase (TK), F14.5L, vaccinia growth factor (VGF), A35R, N1L, E2L/E3L, K1L/K2L, superoxide dismutase locus, 7.5K, C7-K1 L, B13R+B14R, A26L or 14L gene locus in the genome of the virus.

[0037] Exemplary LIVP virus is one that includes a sequence of nucleotides set forth in SEQ ID NO:2, or a sequence of nucleotides that has at least 95% sequence identity to SEQ ID NO:2 and derivatives thereof that contain insertions and deletions to modulate toxicity and/or to introduce encoded reporters and/or therapeutic products. Viruses include, but are not limited to, clonal strains of LIVP and modified forms that contain insertions or deletions. Exemplary of such clonal strains, are viruses that contain a sequence of nucleotides selected from among: a) nucleotides 2,256-180,095 of SEQ ID NO: 36, nucleotides 11,243-182,721 of SEQ ID NO: 37, nucleotides 6,264-181,390 of SEQ ID NO: 38, nucleotides 7,044-181,820 of SEQ ID NO: 39, nucleotides 6,674-181,409 of SEQ ID NO:40, nucleotides 6,716-181,367 of SEQ ID NO:41 or nucleotides 6,899-181,870 of SEQ ID NO: 42; and b) a sequence of nucleotides that has at least 97% sequence identity to a sequence of nucleotides 2,256-180,095 of SEQ ID NO: 36, nucleotides 11,243-182,721 of SEQ ID NO: 37, nucleotides 6,264-181,390 of SEQ ID NO: 38, nucleotides 7,044-181,820 of SEQ ID NO: 39, nucleotides 6,674-181,409 of SEQ ID NO: 40, nucleotides 6,716-181,367 of SEQ ID NO: 41 or nucleotides 6,899-181,870 of SEQ ID NO: 42. The clonal strain can include a left and/or right inverted terminal repeat. Particular exemplary viruses, include, but are not limited to, vaccinia virus and modified forms that contain a sequence of nucleotides set forth in any of SEQ ID NOS: 36-42, a sequence of nucleotides that has at least 97% sequence identity to a sequence of nucleotides set forth in any of SEQ ID NO: 36-42. The viruses can be modified, if necessary to encode a reporter gene product.

[0038] Other oncolytic viruses include, but are not limited to, the LIVP viruses and derivatives whose sequence includes sequence of nucleotides selected from among any of SEQ ID NOS:1 and 3-7, or a sequence of nucleotides that exhibits at least 99% sequence identity to any of SEQ ID NOS: 1 and 3-7. As described herein, practice of the methods are exemplified with the virus GLV-1h68 (also referred to as GL-ONC1), which is an LIVP virus. Such virus is exemplary only because the methods herein detect infection/colonization by a virus and replication in a tumor. Such properties are not unique to the exemplified virus, but are properties shared by oncolytic viruses. Hence, demonstration of the methods with the virus designated GLV-1h68, evidences and shows practice of any of the methods with an oncolytic virus. Whether the virus is efficacious or not can be determined by the methods herein; it is not necessary that such virus have been proven effective.

[0039] Typically, a reporter gene product is inserted into or in place of a non-essential gene or region in the genome of the virus. Exemplary reporters include any known to those of skill in the art, such as, but are not limited to, a fluorescent protein, a bioluminescent protein, a receptor and an enzyme. The fluorescent protein can be selected, for example, from among a green fluorescent protein, an enhanced green fluorescent protein, a blue fluorescent protein, a cyan fluorescent protein, a yellow fluorescent protein, a red fluorescent protein and a far-red fluorescent protein. Exemplary of a fluorescent protein green or red fluorescent proteins, and mutant forms thereof, is the protein designated TurboFP635 (Katushka, available from Evrogen, Moscow, RU; see, also, e.g., Shcherbo et al. (2007) Nat Methods 4:741-746), which is a readily detectable in vivo far-red mutant of the red fluorescent protein from sea anemone Entacmaea quadricolor. Other exemplary reporter enzymes, include, but are not limited to, for example, a luciferase, β-glucuronidase, β-galactosidase, chloramphenicol acetyl tranferase (CAT), alkaline phosphatase, and horseradish peroxidase. Enzymes can be detected by detecting of the product of a substrate whose reaction is catalyzed by the enzyme. Other reporters include, but are not limited to, a receptor that binds to detectable moiety or a ligand attached to a detectable moiety, such as, for example, radiolabel, a chromogen or a fluorescent moiety. Reporter genes typically are operatively linked to a promoter, including a constitutive or inducible promoter. As noted, the viruses that are administered are oncolytic viruses. Generally oncolytic viruses effect treatment by replicating in tumors or tumor cells resulting in lysis. Other activities can be introduced and/or anti-tumor activity can be enhanced by including nucleic acid encoding a heterologous gene product that is a therapeutic and/or diagnostic agent or agents. Exemplary thereof are gene products selected from among an anticancer agent, an anti-metastatic agent, an antiangiogenic agent, an immunomodulatory molecule, an antigen, a cell matrix degradative gene, genes for tissue regeneration and reprogramming human somatic cells to pluripotency, enzymes that modify a substrate to produce a detectable product or signal or are detectable by antibodies, proteins that can bind a contrasting agent, genes for optical imaging or detection, genes for positron emission tomography (PET) imaging and genes encoding products that are detectable by magnetic resonance imaging (MM).

[0040] Provided are methods for detecting infected tumor cells, such as in a body fluid, or monitoring treatment or any of the other methods provided herein in which infected cells are identified, where the oncolytic virus encodes a protein that is expressed on the surface of the infected cell; and detection of the virus is effected by detecting the protein expressed on the surface of the infected cell. Cell surface proteins include any cell surface receptors, such as but are not limited to, transporter proteins, such as norepinephrine transporter (NET) or the sodium iodide symporter (NIS), including human NIS or NET protein. Detection can be effected by contacting the cells or a cell sample, such as fluid sample or biopsy, with an antibody that specifically binds to an epitope on the extracellular domain of the protein expressed on the cell surface. The antibody includes polyclonal antibody preparations and also monoclonal antibodies or antigen binding fragments thereof. The antibodies or fragments thereof can be immobilized on a solid support, such as a magnetic bead. This permits separating cells that express the cell surface protein from other cells in a sample to thereby isolate or enrich for virus-infected cells.

[0041] Also provided are antibodies that specifically bind to the extracellular domain of NIS as expressed in cell, where the NIS protein is encoded by an oncolytic virus that has infected the cells that express the NIS protein. Also provided are isolated polypeptides that include sequence NDSSRAPSSGMDAS (SEQ ID NO: 53) or an epitope contained therein (or a sequence corresponding to that set forth in SEQ ID NO: 53 from different NIS protein, where corresponding sequences are identified by alignment), where the polypeptide does not comprise the complete extracellular domain of NIS. Thus provided are antibodies that specifically bind to these polypeptides and also binds to an epitope on the extracellular domain of NIS when expressed on the surface of a cell.

[0042] Provided are antibodies (monoclonal, polyclonal, and antigen-binding fragments of antibodies) that specifically bind to an epitope within a region corresponding to amino acids 502-515 of the NIS polypeptide of SEQ ID NO: 46. Also provided are conjugates containing amino acids 502-515 of hNIS or a corresponding region from a non-human NIS conjugated directly or indirectly to a hapten, such as via a polypeptide linker. Haptens include any known to those of skill in the art, such as the hapten keyhole limpet hemocyanin.

[0043] Methods are provided herein for detection of leptomeningeal metastases (LM), which result from the spread of metastatic tumor cells to the cerebrospinal fluid (CSF) and leptomeninges. Methods are provided herein to detect and diagnose LM, and also to effect treatment thereof. Methods are provided herein to detect peritoneal carcinomatosis (PC), which is the locoregional progression of cancers of gastrointestinal and gynecological origins. As exemplified herein, oncolytic viruses and the methods provided herein effect detection of LM and PC. In addition, the oncolytic virus infects and eliminates tumor cells in LM and PC.

### DETAILED DESCRIPTION

```
Outline
  A. DEFINITIONS
  B. OVERVIEW
    1. Circulating Tumor Cells As Cancer Prognostic and Diagnostic
    Indicators
    2. Existing Methods For Detection of CTCs
    3. Infection of Metastatic Cells and Cancer Stem Cells by Oncolytic
    Viruses
  C. METHODS FOR DETECTING CIRCULATING TUMOR CELLS
  USING ONCOLYTIC REPORTER VIRUSES
    1. Exemplary Methods for Detection of CTCs with an Oncolytic
    Reporter Virus
      a. Ex vivo Detection of CTCs in Samples Treated with an
      Oncolytic Reporter Virus
      b. Ex vivo Detection of CTCs in Samples from Subjects
      Treated with an Oncolytic Reporter Virus
      c. In vivo Detection of CTCs in Subjects Treated with an
      Oncolytic Reporter Virus
    2. Methods for Enrichment of CTCs for Use in Combination with
    an Oncolytic Reporter Virus
      a. Microfiltration
      b. Microfluidic Devices
      c. Immunomagnetic Separation
      d. Acoustophoresis
      e. Dielectrophoresis
      f. Density Gradient Separation
      g. Selective Cell Lysis (RBC lysis of blood cells)
      h. Combinations of Tumor Cell Enrichment Methods
    3. Detection Methods
    4. Samples for Use in the Methods
      a. Sources
      b. Methods of Obtaining Samples
      c. Control Samples
    5. Viruses for Use in the Method
      a. General Characteristics for Virus Selection
      b. Expression of a Reporter Gene Product
        i. Exemplary Reporter Proteins
          (1) Fluorescent proteins
          (2) Bioluminescent proteins
          (3) Other enzymes
          (4) Proteins that bind to detectable ligands
          (5) Transporter Proteins—
            (a) sodium iodide symporter
            (b) norepinephrine transporter
          (6) Proteins detectable by antibodies
          (7) Fusion proteins
          (8) Proteins that interact with host cell
          proteins
        ii. Operable linkage to promoter
          (1) Promoter characteristics
            (a) Viral and host factors
            (b) Exemplary promoters
        iii. Expression of multiple reporter proteins
      c. Further Modifications of the Viruses
        i. Expression of a Therapeutic and other Gene
        Products exemplary products
        ii. Metastatic Genes
      d. Exemplary Oncolytic Reporter Viruses For Use in the
      Methods
        i. Poxviruses
          (1) Vaccinia Viruses
            (a) Modified Vaccinia Viruses
            (b) Exemplary Modified Vaccinia
            Viruses
        ii. Other Oncolytic Viruses
      e. Production and Preparation of Virus
      Methods for Generating Recombinant Virus
    6. Antibodies for capture of tumor cells
      a. General structure of antibodies
        i. Structural and Functional Domains of Antibodies
        ii. Antibody Fragments
      b. Additional modifications of antibodies
        i. Pegylation
      c. Methods for Producing Antibodies
        i. Nucleic Acids
        ii. Purification
    7. Applications of the Method
    8. Additional Analysis of Identified CTCs and Validation of Results
D. THERAPEUTIC METHODS
E. COMBINATIONS, KITS, AND ARTICLES OF MANUFACTURE
F. EXAMPLES
```

### A. DEFINITIONS

[0045] Unless defined otherwise, all technical and scientific terms used herein have the same meaning as is commonly understood by one of skill in the art to which the invention(s) belong. All patents, patent applications, published applications and publications, GENBANK sequences, websites and other published materials referred to throughout the entire disclosure herein, unless noted otherwise, are incorporated by reference in their entirety. In the event that there is a plurality of definitions for terms herein, those in this section prevail. Where reference is made to a URL or other such identifier or address, it is understood that such identifiers can change and particular information on the internet can come and go, but equivalent information is known and can be readily accessed, such as by searching the internet and/or appropriate databases. Reference thereto evidences the availability and public dissemination of such information.

[0046] As used herein, a circulating tumor cell or CTC refers to a tumor cell derived from a primary cancer site that has detached from the primary tumor mass. CTCs include cancer cells, malignant tumor cells and cancer stem cells. CTCs include any cancer cell or cluster of cancer cells that is found in a fluid sample obtained from a subject. CTCs are often epithelial cells shed from solid tumors. CTCs also can be mesothelial cells from carcinomas or melanocytes from melanomas. A CTC is typically a cell originating from a primary tumor, but also can be a cell shed from a metastatic tumor (e.g., a secondary or tertiary tumor).

[0047] As used herein, the term “CTC” is intended to encompass any tumor cell that has detached from a tumor. Thus, as used herein, a CTC encompasses tumor cells found in circulation, such as in the blood or lymph, or in other fluid samples, such as, but not limited to, pleural fluid, peritoneal fluid, central spinal fluid, abdominal fluid, pancreatic fluid, cerebrospinal fluid, brain fluid, ascites, urine, saliva, bronchial lavage, bile, sweat, tears, ear flow, sputum, semen, vaginal flow, milk, amniotic fluid, and secretions of respiratory, intestinal or genitourinary tract. The term CTC as used herein also includes disseminated tumor cells (DTCs) found in the bone marrow.

[0048] As used herein, a “tumor cell” is any cell that is part of a tumor or that is shed from a tumor (e.g. a circulating tumor cell). Tumor cells typically are cells undergoing early, intermediate, or advanced stages of neoplastic progression, including a pre-neoplastic cells (i.e. hyperplastic cells and dysplastic cells) and neoplastic cells.

[0049] As used herein, a disseminated tumor cell (DTC) typically refers to a tumor cell derived from a primary cancer site that has detached from the primary tumor mass and is found in the bone marrow. For purposes herein, a DTC is defined as a type of CTC. Thus, the methods provided herein for the detection of CTCs encompass detection of DTCs found in the bone marrow.

[0050] As used herein, a cancer stem cell (CSC), refers to a sub-population of cancer cells that possesses characteristics normally associated with stem cells, such as self-renewal, the ability to differentiate into multiple cell types and give rise to multiple cancer cell types, indefinite life span due to telomerase activity and abbreviated cell cycle regulation. CSCs are tumorigenic and are capable of forming tumors from very small number of cells in animal tumor models. CSCs can persist in tumors as a distinct sub-population and cause relapse and metastasis by giving rise to new tumors. CSCs also are found in sub-populations in the bone marrow and among subsets of CTCs.

[0051] As used herein, a “tumor cell enrichment method” refers to any method that increases the proportion of tumor cells in a sample relative to non-tumor cells. The tumor cell enrichment method can involve separation of tumor cells from non-tumor cells based on a difference in one or more properties of the tumor cells compared to non-tumor cells. For example, a tumor cell enrichment method can involve positive selection and/or negative selection methods. For example, the tumor cell enrichment method can involve positive selection and separation of tumor cells from non-tumor cells and other components of the sample based on one or more properties exhibited by the tumor cell and/or can involve negative selection and removal of non-tumor cells or other components from the sample based on one or more properties exhibited by the non-tumor cells.

[0052] As used herein, “enriching tumor cells” in a sample means increasing the proportion of tumor cells in a sample relative to non-tumor cells in the sample including, for example, selection of one or more tumor cells or removal of one or more non-tumor cells to produce an enriched sample. Where one or more tumor cells are selected, the selected tumor cells represent the enriched sample. The enriched sample can include, for example, cells selected in a solution, column, or gradient, cells captured on a microfluidic device or a microfilter, or selected cells on a column, gradient, microfluidic device or a microfilter that have been transferred to a new container or medium.

[0053] As used herein, a physical property of a cell refers to any mechanical property of a cell including, but not limited to, size, stiffness, density, shear modulus, deformability and electrical charge.

[0054] As used herein a biological property of a cell refers to any property of the cell that relates to the biological activity of the cell including, but not limited to, surface protein expression, viability, and invasiveness.

[0055] As used herein, a microfilter refers to any type of filtration device containing an array of pores of a sufficient size to reduce or inhibit the passage of tumor cells through the pore and permit the passage of non-tumor cells through the pore.

[0056] As used herein, the term “microfluidic device” refers to a device for handling, processing, ejecting and/or analyzing a fluid sample including at least one channel or chamber having microscale dimensions. For example the typical channels of chambers have at least one cross sectional dimension in the range of about 0.1 microns (μm) to about 1500 μm, such as for example in the range of 0.2 μm to 1000 μm, such as for example in the range of 0.4 μm to 500 μm. Typically, microfluidic chambers of channel hold small quantities of fluid, such as, for example, 10 nanoliters (nL) to 5 milliliters (mL), such as, for example, 200 mL to 500 microliters (μL) such as for example, 500 nL to 200 μL.

[0057] As used herein, level or amount of tumor cells in a sample refers to concentration of tumor cells in any given sample (i.e. the number of tumor cells per volume of a fluid sample).

[0058] As used herein, cytosine refers to the well known technique by which a single layer of cells is deposited onto defined area of a surface, such as a glass slide. As used herein, a sample refers to a sample containing at least one cell from a subject.

[0059] A sample encompasses a body fluid or tissue sample from a subject. A sample can include, for example, buffer solutions, saline solutions, cell culture media; or other components added to the sample for use in the methods.

[0060] As used herein, a fluid sample refers to any liquid sample that contains one or more cells from a subject. The fluid sample can be a sample that is a bodily fluid from a subject or can be a liquid cell suspension generated by dispersion of cells from a tissue sample from a subject in a suitable liquid medium.

[0061] As used herein, contacting a sample containing cells with a virus means co-incubation of a virus with the sample such that the virus infects one or more tumor cells contained in the sample.

[0062] As used herein, a biopsy refers to a tissue sample that is removed from a subject for the purpose of determining if the sample contains cancer cells.

[0063] As used herein, morphological analysis refers to visually observable characteristics of a cell, such as size, shape, or the presence or absence of certain features of the cell.

[0064] As used herein, a control sample refers to any sample that serves as a reference in the methods provided. For example, the control sample can be a sample with a known level of CTCs, from a subject with a known cancer prognosis, from a subject with a particular cancer, from a subject with a particular stage of cancer, or from a subject without any detectable cancer. The control sample can be a sample from a subject that has not received an anti-cancer therapy. The control sample can be from an individual or from a population pool.

[0065] As used herein, a “cycle of administration” refers to the dosing schedule of an oncolytic virus or oncolytic reporter virus, including the duration of the cycle, the number of times of administration of the virus and the timing of administration of the virus. For example, the duration of a cycle of administration can be days, weeks or months, such as two days, three days, four days, five days, six days, seven days, 14 days, 21 days or 28 days. The number of times of administration refers to the number of times the virus is administered over the duration of the cycle. For example, in each cycle, the virus can be administered one time or several times, for example, two times, three times, four times, five times, six times or seven times. The timing of administration refers to when the virus is administered over the duration of the cycle. For example, the virus can be administered on the first day of the cycle, the first and second day of the cycle, each of the first three consecutive days of the cycle, each of the first four consecutive days of the cycle, each of the first five consecutive days of the cycle, each of the first six consecutive days of the cycle, or each of the first seven consecutive days of the cycle. A virus can be administered for one cycle of administration or for a plurality of cycles.

[0066] As used herein, “prognosis” refers to a prediction of how a patient will progress, and whether there is a chance of recovery. “Cancer prognosis” as used herein refers to a prediction of the probable course or outcome of the cancer. As used herein, cancer prognosis includes the prediction of any one or more of the following: duration of survival of a patient susceptible to or diagnosed with a cancer, duration of recurrence-free survival, duration of progression free survival of a patient susceptible to or diagnosed with a cancer, response rate in a group of patients susceptible to or diagnosed with a cancer, duration of response in a patient or a group of patients susceptible to or diagnosed with a cancer, and/or likelihood of metastasis in a patient susceptible to or diagnosed with a cancer. Prognosis includes prediction of favorable responses to cancer treatments, such as a conventional cancer therapy.

[0067] A favorable or poor prognosis can, for example, be assessed in terms of patient survival, likelihood of disease recurrence or disease metastasis. Patient survival, disease recurrence and metastasis can for example be assessed in relation to a defined time point, e.g. at a given number of years after a cancer treatment (e.g. surgery to remove one or more tumors) or after initial diagnosis. In one example, a favorable or poor prognosis can be assessed in terms of overall survival or disease free survival.

[0068] As used herein, cancer progression refers to the process by which a cancer develops, for example, from abnormal cell growth to the growth of a tumor to the advancement of the tumor into a malignant and aggressive phenotype. Generally, tumor growth is characterized in stages, or the extent of cancer in the body. Staging is typically based on the size of the tumor, the number of tumors present, whether lymph nodes contain cancer, biological and/or morphological characteristics of the tumor cells (e.g., gene expression profile, gene mutation, chromosomal abnormality, cell size or shape), and whether the cancer has spread from the original site to other parts of the body. Stages of cancer include stage I, stage II, stage III and stage IV. Higher stage numbers generally indicate more extensive disease (e.g. larger tumor size and/or spread of the cancer beyond the organ in which it first developed to nearby lymph nodes and/or organs adjacent to the location of the primary tumor). Staging of cancers is dependent on the cancer type. Guidelines for staging particular cancers are well-known in the art. Early stage cancer, generally Stage I or Stage II cancer, refers to cancers that have been clinically determined to be detected by conventional methods such as, for example, mammography for breast cancer patients or X-ray. Late stage cancer, or Stage IV cancer, typically refers to cancer that has metastasized to surrounding and/or distant organs or other parts of the body.

[0069] As used herein, reciting that a treatment is efficacious means that the treatment as assessed by the methods herein at the time of assessment exhibits properties indicative of treatments that are efficacious. Thus, for example, detection of reporter virus in a CTC in a body fluid sample, following, such as within a day or two, systemic administration of the virus to a subject indicates that the virus has infected cells in a tumor and is replicating there such that it appears in tumor cells in circulation. When such is observed, it indicates that the oncolytic virus has infected and begun replicating in tumor cells, and, thus is behaving as an effective treatment.

[0070] As used herein, cancer remission refers to the period of time after treatment of a cancer in a subject, where the subject does not exhibit any symptoms of the cancer and the cancer is not detectable (complete remission) or where the subject exhibits a reduction in one or more symptoms of the cancer and a decrease in the number of cancer cells (partial remission).

[0071] As used herein, the term “circulating tumor cell marker,” “CTC cell marker” or “CTC specific marker” refers to a nucleic acid or peptide expressed by a gene whose expression level, alone or in combination with other genes, is correlated with the presence of CTCs in a sample. The correlation can relate to either an increased or decreased expression of the gene (e.g. increased or decreased levels of mRNA or the peptide encoded by the gene).

[0072] As used herein, the term “cancer stem cell marker” refers to a nucleic acid or peptide expressed by a gene whose expression level, alone or in combination with other genes, is correlated with the presence of cancer stem cells (i.e. tumorigenic cancer cells). The correlation can relate to either an increased or decreased expression of the gene (e.g. increased or decreased levels of mRNA or the peptide encoded by the gene).

[0073] As used herein, epithelial to mesenchymal transition, or EMT, refers to the process whereby epithelial-type cells, which are normally immobile, undergo transition into a mesenchymal-type cell characterized by a proliferative and mobile phenotype. In cancer, EMT is involved in tumor invasion and metastasis of epithelial type tumors. During metastasis of a tumor, tumor cells at the invasive front of the primary tumor typically lose expression of one or more cell adhesion molecules, such as E-cadherin, EpCAM and cytokeratin (CK), dissociate from the neighboring epithelial cells, and become single motile cells. Hence, EMT as used herein with respect to tumor cells refers to the metastatic process by which tumor cells acquire the capacity to detach from the primary tumor and invade surrounding tissues and/or enter circulation.

[0074] As used herein, the term “EMT marker” refers to a nucleic acid or peptide expressed by a gene whose expression level, alone or in combination with other genes, is correlated with the presence of cells that have undergone epithelial-mesenchymal transition. The correlation can relate to either an increased or decreased expression of the gene (e.g. increased or decreased levels of mRNA or the peptide encoded by the gene).

[0075] As used herein, a subject includes any organism, including an animal, for whom diagnosis, screening, monitoring or treatment is contemplated. Animals include mammals, such as, for example, primates, domesticated animals and livestock. An exemplary primate is a human.

[0076] A patient refers to a subject, such as a mammal, primate, human, domesticated animal or livestock, or other animal subject afflicted with a disease condition or for which a disease condition is to be determined or risk of a disease condition is to be determined. Typically, a patient refers to a human subject exhibiting symptoms of a disease or disorder.

[0077] As used herein, animals include any animal, such as, but are not limited to, primates, including humans, apes and monkeys; rodents, such as mice, rats, rabbits, and ferrets; fowl, such as chickens; ruminants, such as goats, cows, deer, and sheep; horses, pigs, dogs, cats, fish, and other animals. Non-human animals exclude humans as the contemplated animal.

[0078] As used herein, cancer recurrence or relapse refers to the return of cancer after treatment and after a period of time during which the cancer cannot be detected. The length of time between when the cancer is undetectable and recurrence can vary. The same cancer can recur at the same site of original tumor growth or at a different location in the body. For example, prostate cancer can return in the area of the prostate gland, even if the gland was removed, or it can recur in the bone marrow.

[0079] As used herein, the term “subject suspected of having cancer” refers to a mammal, typically a human, who is being tested or screened for cancer. Generally such subjects, present a symptoms indicative of a cancer (e.g., a noticeable lump or mass) or is being screened for a cancer (e.g., during a routine physical). A subject suspected of having cancer also can have one or more risk factors, such as the presence of a genetic marker indicative of risk of a cancer. A “subject suspected of having cancer” encompasses an individual who has received an initial diagnosis but for whom the stage of cancer is not known. The term further includes people who once had cancer (e.g., an individual in remission).

[0080] As used herein, the term “subject at risk for cancer” refers to a subject with one or more risk factors for developing a specific cancer. Risk factors include, but are not limited to, gender, age, genetic predisposition, environmental expose, and previous incidents of cancer, preexisting non-cancer diseases, and lifestyle.

[0081] As used herein, the term “suffering from disease” refers to a subject (e.g., a human) that is experiencing a particular disease. It is not intended that the methods provided be limited to any particular signs or symptoms, nor disease. Thus, it is intended that the methods provided encompass subjects that are experiencing any range of disease, from sub-clinical to full-blown disease, wherein the subject exhibits at least some of the indicia (e.g., signs and symptoms) associated with the particular disease.

[0082] As used herein, the term “subject diagnosed with a cancer” refers to a subject who has been tested and found to have cancerous cells. The cancer can be diagnosed using any suitable method, including but not limited to, biopsy, x-ray, MRI, PET, blood test, and the diagnostic methods provided herein.

[0083] As used herein, a “metastatic cell” is a cell that has the potential for metastasis. Metastatic cells have the ability to metastasize from a first tumor in a subject and can colonize tissue at a different site in the subject to form a second tumor at the site.

[0084] As used herein, “metastasis” refers to the spread of cancer from one part of the body to another. For example, in the metastatic process, malignant cells can spread from the site of the primary tumor in which the malignant cells arose and move into lymphatic and blood vessels, which transport the cells to normal tissues elsewhere in an organism where the cells continue to proliferate. A tumor formed by cells that have spread by metastasis is called a “metastatic tumor,” a “secondary tumor” or a “metastasis.”

[0085] As used herein, “tumorigenic cell,” is a cell that, when introduced into a suitable site in a subject, can form a tumor. The cell can be non-metastatic or metastatic.

[0086] As used herein, a “normal cell” or “non-tumor cell” are used interchangeably and refer to a cell that is not derived from a tumor.

[0087] As used herein, the term “cell” refers to the basic unit of structure and function of a living organism as is commonly understood in the biological sciences. A cell can be a unicellular organism that is self-sufficient and that can exist as a functional whole independently of other cells. A cell also can be one that, when not isolated from the environment in which it occurs in nature, is part of a multicellular organism made up of more than one type of cell. Such a cell, which can be thought of as a “non-organism” or “non-organismal” cell, generally is specialized in that it performs only a subset of the functions performed by the multicellular organism as whole. Thus, this type of cell is not a unicellular organism. Such a cell can be a prokaryotic or eukaryotic cell, including animal cells, such as mammalian cells, human cells and non-human animal cells or non-human mammalian cells. Animal cells include any cell of animal origin that can be found in an animal. Thus, animal cells include, for example, cells that make up the various organs, tissues and systems of an animal.

[0088] As used herein an “isolated cell” is a cell that exists in vitro and is separate from the organism from which it was originally derived.

[0089] As used herein, a “cell line” is a population of cells derived from a primary cell that is capable of stable growth in vitro for many generations. Cell lines are commonly referred to as “immortalized” cell lines to describe their ability to continuously propagate in vitro.

[0090] As used herein a “tumor cell line” is a population of cells that is initially derived from a tumor. Such cells typically have undergone some change in vivo such that they theoretically have indefinite growth in culture; unlike primary cells, which can be cultured only for a finite period of time. Such cells can form tumors after they are injected into susceptible animals.

[0091] As used herein, a “primary cell” is a cell that has been isolated from a subject.

[0092] As used herein, a “host cell” or “target cell” are used interchangeably to mean a cell that can be infected by a virus.

[0093] As used herein, the term “tissue” refers to a group, collection or aggregate of similar cells generally acting to perform a specific function within an organism.

[0094] As used herein, “virus” refers to any of a large group of infectious entities that cannot grow or replicate without a host cell. Viruses typically contain a protein coat surrounding an RNA or DNA core of genetic material, but no semipermeable membrane, and are capable of growth and multiplication only in living cells. Viruses include, but are not limited to, poxviruses, herpesviruses, adenoviruses, adeno-associated viruses, lentiviruses, retroviruses, rhabdoviruses, papillomaviruses, vesicular stomatitis virus, measles virus, Newcastle disease virus, picornavirus, Sindbis virus, papillomavirus, parvovirus, reovirus, coxsackievirus, influenza virus, mumps virus, poliovirus, and semliki forest virus.

[0095] As used herein, oncolytic viruses refer to viruses that replicate selectively in tumor cells in tumorous subjects. Some oncolytic viruses can kill a tumor cell following infection of the tumor cell. For example, an oncolytic virus can cause death of the tumor cell by lysing the tumor cell or inducing cell death of the tumor cell.

[0096] As used herein the term “vaccinia virus” or “VACV” denotes a large, complex, enveloped virus belonging to the poxvirus family. It has a linear, double-stranded DNA genome approximately 190 kbp in length, and which encodes approximately 200 proteins. Vaccinia virus strains include, but are not limited to, strains of, derived from, or modified forms of Western Reserve (WR), Copenhagen, Tashkent, Tian Tan, Lister, Wyeth, IHD-J, and IHD-W, Brighton, Ankara, MVA, Dairen I, LIPV, LC16M8, LC16MO, LIVP, WR 65-16, Connaught, New York City Board of Health vaccinia virus strains.

[0097] As used herein, Lister Strain of the Institute of Viral Preparations (LIVP) or LIVP virus strain refers to a virus strain that is the attenuated Lister strain (ATCC Catalog No. VR-1549) that was produced by adaption to calf skin at the Institute of Viral Preparations, Moscow, Russia (Al'tshtein et al. (1985) Dokl. Akad. Nauk USSR 285:696-699). The LIVP strain can be obtained, for example, from the Institute of Viral Preparations, Moscow, Russia (see. e.g., Kutinova et al. (1995) Vaccine 13:487-493); the Microorganism Collection of FSRI SRC VB Vector (Kozlova et al. (2010) Environ. Sci. Technol. 44:5121-5126); or can be obtained from the Moscow Ivanovsky Institute of Virology (C0355 K0602; Agranovski et al. (2006) Atmospheric Environment 40:3924-3929). It also is well known to those of skill in the art; it was the vaccine strain used for vaccination in the USSR and throughout Asia and India. The strain is used by researchers and is well known (see e.g., Altshteyn et al. (1985) Dokl. Akad. Nauk USSR 285:696-699; Kutinova et al. (1994) Arch. Virol. 134:1-9; Kutinova et al. (1995) Vaccine 13:487-493; Shchelkunov et al. (1993) Virus Research 28:273-283; Sroller et al. (1998) Archives Virology 143:1311-1320; Zinoviev et al. (1994) Gene 147:209-214; and Chkheidze et al. (1993) FEBS 336:340-342). Among the LIVP strains is one that contains a genome having a sequence of nucleotides set forth in SEQ ID NO: 2, or a sequence that is at least or at least about 99% identical to the sequence of nucleotides set forth in SEQ ID NO: 2.

[0098] As used herein, an LIVP clonal strain or LIVP clonal isolate refers to a virus that is derived from the LIVP virus strain by plaque isolation, or other method in which a single clone is propagated, and that has a genome that is homogenous in sequence. Hence, an LIVP clonal strain includes a virus whose genome is present in a virus preparation propagated from LIVP. An LIVP clonal strain does not include a recombinant LIVP virus that is genetically engineered by recombinant means using recombinant DNA methods to introduce heterologous nucleic acid. In particular, an LIVP clonal strain has a genome that does not contain heterologous nucleic acid that contains an open reading frame encoding a heterologous protein. For example, an LIVP clonal strain has a genome that does not contain non-viral heterologous nucleic acid that contains an open reading frame encoding a non-viral heterologous protein. As described herein, however, it is understood that any of the LIVP clonal strains provided herein can be modified in its genome by recombinant means to generate a recombinant virus. For example, an LIVP clonal strain can be modified to generate a recombinant LIVP virus that contains insertion of nucleotides that contain an open reading frame encoding a heterologous protein.

[0099] As used herein, LIVP 1.1.1 is an LIVP clonal strain that has a genome having a sequence of nucleotides set forth in SEQ ID NO: 36 or a genome having a sequence of nucleotides that has at least 99% sequence identity to the sequence of nucleotides set forth in SEQ ID NO: 36.

[0100] As used herein, LIVP 2.1.1 is an LIVP clonal strain that has a genome having a sequence of nucleotides set forth in SEQ ID NO: 37, or a genome having a sequence of nucleotides that has at least 99% sequence identity to the sequence of nucleotides set forth in SEQ ID NO: 37.

[0101] As used herein, LIVP 4.1.1 is an LIVP clonal strain that has a genome having a sequence of nucleotides set forth in SEQ ID NO: 38, or a genome having a sequence of nucleotides that has at least 99% sequence identity to the sequence of nucleotides set forth in SEQ ID NO: 38.

[0102] As used herein, LIVP 5.1.1 is an LIVP clonal strain that has a genome having a sequence of nucleotides set forth in SEQ ID NO: 39, or a genome having a sequence of nucleotides that has at least 99% sequence identity to the sequence of nucleotides set forth in SEQ ID NO: 39.

[0103] As used herein, LIVP 6.1.1 is an LIVP clonal strain that has a genome having a sequence of nucleotides set forth in SEQ ID NO: 40, or a genome having a sequence of nucleotides that has at least 99% sequence identity to the sequence of nucleotides set forth in SEQ ID NO: 40.

[0104] As used herein, LIVP 7.1.1 is an LIVP clonal strain that has a genome having a sequence of nucleotides set forth in SEQ ID NO: 41, or a genome having a sequence of nucleotides that has at least 99% sequence identity to the sequence of nucleotides set forth in SEQ ID NO: 41.

[0105] As used herein, LIVP 8.1.1 is an LIVP clonal strain that has a genome having a sequence of nucleotides set forth in SEQ ID NO: 42, or a genome having a sequence of nucleotides that has at least 99% sequence identity to the sequence of nucleotides set forth in SEQ ID NO: 42.

[0106] As used herein, multiplicity of infection (MOI) refers to the ratio of viral particles to cells used for infection. For example, infection at a MOI of 1 mean that virus is added to a sample of cells at a ratio of 1 virus particle to one cell.

[0107] As used herein, the term “modified virus” refers to a virus that is altered compared to a parental strain of the virus. Typically modified viruses have one or more truncations, mutations, insertions or deletions in the genome of virus. A modified virus can have one or more endogenous viral genes modified and/or one or more intergenic regions modified. Exemplary modified viruses can have one or more heterologous nucleic acid sequences inserted into the genome of the virus. Modified viruses can contain one or more heterologous nucleic acid sequences in the form of a gene expression cassette for the expression of a heterologous gene.

[0108] As used herein, a modified LIVP virus strain refers to an LIVP virus that has a genome that is not contained in LIVP, but is a virus that is produced by modification of a genome of a strain derived from LIVP. Typically, the genome of the virus is modified by substitution (replacement), insertion (addition) or deletion (truncation) of nucleotides. Modifications can be made using any method known to one of skill in the art such as genetic engineering and recombinant DNA methods. Hence, a modified virus is a virus that is altered in its genome compared to the genome of a parental virus. Exemplary modified viruses have one or more heterologous nucleic acid sequences inserted into the genome of the virus. Typically, the heterologous nucleic acid contains an open reading frame encoding a heterologous protein. For example, modified viruses herein can contain one or more heterologous nucleic acid sequences in the form of a gene expression cassette for the expression of a heterologous gene.

[0109] As used herein a “gene expression cassette” or “expression cassette” is a nucleic acid construct, containing nucleic acid elements that are capable of effecting expression of a gene in hosts that are compatible with such sequences. Expression cassettes include at least promoters and optionally, transcription termination signals. Typically, the expression cassette includes a nucleic acid to be transcribed operably linked to a promoter. Expression cassettes can contain genes that encode, for example, a therapeutic gene product, or a detectable protein or a selectable marker gene.

[0110] As used herein, a heterologous nucleic acid (also referred to as exogenous nucleic acid or foreign nucleic acid) refers to a nucleic acid that is not normally produced in vivo by an organism or virus from which it is expressed or that is produced by an organism or a virus but is at a different locus, or that mediates or encodes mediators that alter expression of endogenous nucleic acid, such as DNA, by affecting transcription, translation, or other regulatable biochemical processes. Hence, heterologous nucleic acid is often not normally endogenous to a virus into which it is introduced. Heterologous nucleic acid can refer to a nucleic acid molecule from another virus in the same organism or another organism, including the same species or another species. Heterologous nucleic acid, however, can be endogenous, but is nucleic acid that is expressed from a different locus or altered in its expression or sequence (e.g., a plasmid). Thus, heterologous nucleic acid includes a nucleic acid molecule not present in the exact orientation or position as the counterpart nucleic acid molecule, such as DNA, is found in a genome. Generally, although not necessarily, such nucleic acid encodes RNA and proteins that are not normally produced by the virus or in the same way in the virus in which it is expressed. Any nucleic acid, such as DNA, that one of skill in the art recognizes or considers as heterologous, exogenous or foreign to the virus in which the nucleic acid is expressed is herein encompassed by heterologous nucleic acid. Examples of heterologous nucleic acid include, but are not limited to, nucleic acid that encodes exogenous peptides/proteins, including diagnostic and/or therapeutic agents. Proteins that are encoded by heterologous nucleic acid can be expressed within the virus, secreted, or expressed on the surface of the virus in which the heterologous nucleic acid has been introduced.

[0111] As used herein, a heterologous protein or heterologous polypeptide (also referred to as exogenous protein, exogenous polypeptide, foreign protein or foreign polypeptide) refers to a protein that is not normally produced by a virus.

[0112] As used herein, operative linkage of heterologous nucleic acids to regulatory and effector sequences of nucleotides, such as promoters, enhancers, transcriptional and translational stop sites, and other signal sequences refers to the relationship between such nucleic acid, such as DNA, and such sequences of nucleotides. For example, operative linkage of heterologous DNA to a promoter refers to the physical relationship between the DNA and the promoter such that the transcription of such DNA is initiated from the promoter by an RNA polymerase that specifically recognizes, binds to and transcribes the DNA. Thus, operatively linked or operationally associated refers to the functional relationship of a nucleic acid, such as DNA, with regulatory and effector sequences of nucleotides, such as promoters, enhancers, transcriptional and translational stop sites, and other signal sequences. For example, operative linkage of DNA to a promoter refers to the physical and functional relationship between the DNA and the promoter such that the transcription of such DNA is initiated from the promoter by an RNA polymerase that specifically recognizes, binds to and transcribes the DNA. In order to optimize expression and/or transcription, it can be necessary to remove, add or alter 5′ untranslated portions of the clones to eliminate extra, potentially inappropriate, alternative translation initiation (i.e., start) codons or other sequences that can interfere with or reduce expression, either at the level of transcription or translation. In addition, consensus ribosome binding sites can be inserted immediately 5′ of the start codon and can enhance expression (see, e.g., Kozak J. Biol. Chem. 266: 19867-19870 (1991) and Shine and Delgarno, Nature 254(5495):34-38 (1975)). The desirability of (or need for) such modification can be empirically determined.

[0113] As used herein, a heterologous promoter refers to a promoter that is not normally found in the wild-type organism or virus or that is at a different locus as compared to a wild-type organism or virus. A heterologous promoter is often not endogenous to a virus into which it is introduced, but has been obtained from another virus or prepared synthetically. A heterologous promoter can refer to a promoter from another virus in the same organism or another organism, including the same species or another species. A heterologous promoter, however, can be endogenous, but is a promoter that is altered in its sequence or occurs at a different locus (e.g., at a different location in the genome or on a plasmid). Thus, a heterologous promoter includes a promoter not present in the exact orientation or position as the counterpart promoter is found in a genome.

[0114] A synthetic promoter is a heterologous promoter that has a nucleotide sequence that does not occur in nature. A synthetic promoter can be a nucleic acid molecule that has a synthetic sequence or a sequence derived from a native promoter or portion thereof. A synthetic promoter also can be a hybrid promoter composed of different elements derived from different native promoters.

[0115] As used herein, a “reporter gene” is a gene that encodes a reporter molecule that can be detected when expressed by a virus provided herein or encodes a molecule that modulates expression of a detectable molecule, such as nucleic acid molecule or a protein, or modulates an activity or event that is detectable. Hence reporter molecules include, nucleic acid molecules, such as expressed RNA molecules, and proteins.

[0116] As used herein, a “heterologous reporter gene” is a reporter gene that is not natively present in a virus or is a gene that is present at a different locus than in its native locus in a virus. Heterologous reporter genes can contain nucleic acid that is not endogenous to the virus into which it is introduced, but has been obtained from another virus or cell or prepared synthetically. Heterologous reporter genes, however, can be endogenous, but contain nucleic acid that is expressed from a different locus or altered in its expression or sequence. Generally, such reporter genes encode RNA and proteins that are not normally produced by the virus or that are not produced under the same regulatory schema, such as the promoter.

[0117] As used herein, a “reporter protein” or “reporter gene product” refers to any detectable protein or product expressed by a reporter gene. Reporter proteins can be expressed from endogenous or heterologous genes. Exemplary reporter proteins are provided herein and include, for example, receptors or other proteins that can specifically bind to a detectable compound, proteins that can emit a detectable signal such as a fluorescence signal, and enzymes that can catalyze a detectable reaction or catalyze formation of a detectable product. Reporter gene products also can include detectable nucleic acids.

[0118] As used herein, a “reporter virus” is a virus that expresses or encodes a reporter gene or a reporter protein or a detectable protein or moiety. It is a virus that is detectable in a cell. As used herein, an oncolytic reporter virus is an oncolytic virus that expresses or encodes a reporter gene or a reporter protein or a detectable protein or moiety.

[0119] As used herein, “detecting an oncolytic reporter virus” means detecting tumor cells infected by the virus by one or more methods that detect a reporter gene product encoded by the virus that is expressed during infection of the tumor cell. Such methods include, but are not limited to detection of proteins such fluorescent proteins, luminescent proteins or proteins that bind to detectable ligands or antibodies.

[0120] As used herein, a fluorescent protein (FP) refers to a protein that possesses the ability to fluoresce (i.e., to absorb energy at one wavelength and emit it at another wavelength). For example, a green fluorescent protein (GFP) refers to a polypeptide that has a peak excitation spectrum at 490 nm or about 490 nm and peak emission spectrum at 510 nm or about 510 nm (expressed herein as excitation/emission 490 nm/510 nm). A variety of FPs that emit at various wavelengths are known in the art. Exemplary FPs include, but are not limited to, a violet fluorescent protein (VFP; peak excitation/emission at or about 355 nm/424 nm), a blue fluorescent protein (BFP; peak excitation/emission at or about 380-400 nm/450 nm), cyan fluorescent protein (CFP; peak excitation/emission at or about 430-460 nm/480-490 nm), green fluorescent protein (GFP; peak excitation/emission at or about 490 nm/510 nm), yellow fluorescent protein (YFP; peak excitation/emission at or about 515 nm/530 nm), orange fluorescent protein (OFP; peak excitation/emission at or about 550 nm/560 nm), red fluorescent protein (RFP; peak excitation/emission at or about 560-590 nm/580-610 nm), far-red fluorescent protein (peak excitation/emission at or about 590 nm/630-650 nm), or near-infrared fluorescent protein (peak excitation/emission at or about 690 nm/713 nm). Extending the spectrum of available colors of fluorescent proteins to blue, cyan, orange, yellow and red variants provides a method for multicolor tracking of proteins.

[0121] Examples of fluorescent proteins and their variants include, but are not limited to, GFPs, such as Emerald (EmGFP; Invitrogen, Carlsbad, Calif.), EGFP (Clontech, Palo Alto, Calif.), Azami-Green (MBL International, Woburn, Mass.), Kaede (MBL International, Woburn, Mass.), ZsGreen1 (Clontech, Palo Alto, Calif.) and CopGFP (Evrogen/Axxora, LLC, San Diego, Calif.); CFPs, such as Cerulean (Rizzo, Nat. Biotechnol. 22(4):445-9 (2004)), mCFP (Wang et al. (2004) Proc. Natl. Acad. Sci. USA 101(48):16745-9), AmCyan1 (Clontech, Palo Alto, Calif.), MiCy (MBL International, Woburn, Mass.), and CyPet (Nguyen and Daugherty, Nat. Biotechnol. 23(3):355-60 (2005)); BFPs, such as EBFP (Clontech, Palo Alto, Calif.); YFPs, such as EYFP (Clontech, Palo Alto, Calif.), YPet (Nguyen and Daugherty, Nat. Biotechnol. 23(3):355-60 (2005)), Venus (Nagai et al. Nat. Biotechnol. 20(1):87-90 (2002)), ZsYellow (Clontech, Palo Alto, Calif.), and mCitrine (Wang et al., Proc. Natl. Acad. Sci. USA 101(48):16745-9 (2004)); OFPs, such as cOFP (Strategene, La Jolla, Calif.), mKO (MBL International, Woburn, Mass.), and mOrange; RFPs, such as Discosoma RFP (DsRed) isolated from the corallimorph Discosoma (Matz et al. (1999) Nature Biotechnology 17: 969-973) and Discosoma variants, such as monomeric red fluorescent protein 1 (mRFP1), mCherry, tdTomato, mStrawberry, mTangerine (Wang et al. (2004) Proc. Natl. Acad. Sci. USA 101(48):16745-9), DsRed2 (Clontech, Palo Alto, Calif.), and DsRed-T1 (Bevis and Glick, Nat. Biotechnol., 20: 83-87 (2002)), Anthomedusa J-Red (Evrogen) and Anemonia AsRed2 (Clontech, Palo Alto, Calif.); far-red FPs, such as Actinia AQ143 (Shkrob et al. (2005) Biochem J. 392(Pt 3):649-54), Entacmaea eqFP611 (Wiedenmann et al. (2002) Proc. Natl. Acad. Sci. USA. 99(18):11646-51), Discosoma variants, such as mPlum and mRasberry (Wang et al. (2004) Proc. Natl. Acad. Sci. USA 101(48):16745-9), Heteractis HcRed1 and t-HcRed (Clontech, Palo Alto, Calif.), TurboFP635 (Katushka), mKate, and mNeptune; near-infrared FPs, such as and IFP1.4 (Scherbo et al. (2007) Nat Methods 4:741-746), eqFP650 and eqFP670; and others (see, e.g., Shaner N C, Steinbach P A, and Tsien R Y. (2005) Nat Methods. 2(12):905-9 and Chudakov et al. (2010) Physil Rev 90:1103-1163 for description of additional exemplary FPs of various excitation/emission spectra)

[0122] As used herein, Aequorea GFP refers to GFPs from the genus Aequorea and to mutants or variants thereof. Such variants and GFPs from other species, such as Anthozoa reef coral, Anemonia sea anemone, Renilla sea pansy, Galaxea coral, Acropora brown coral, Trachyphyllia and Pectimidae stony coral and other species are well known and are available and known to those of skill in the art.

[0123] As used herein, luminescence refers to the detectable electromagnetic (EM) radiation, generally, ultraviolet (UV), infrared (IR) or visible EM radiation that is produced when the excited product of an exergonic chemical process reverts to its ground state with the emission of light. Chemiluminescence is luminescence that results from a chemical reaction. Bioluminescence is chemiluminescence that results from a chemical reaction using biological molecules (or synthetic versions or analogs thereof) as substrates and/or enzymes. Fluorescence is luminescence in which light of a visible color is emitted from a substance under stimulation or excitation by light or other forms radiation such as ultraviolet (UV), infrared (IR) or visible EM radiation.

[0124] As used herein, chemiluminescence refers to a chemical reaction in which energy is specifically channeled to a molecule causing it to become electronically excited and subsequently to release a photon, thereby emitting visible light. Temperature does not contribute to this channeled energy. Thus, chemiluminescence involves the direct conversion of chemical energy to light energy.

[0125] As used herein, bioluminescence, which is a type of chemiluminescence, refers to the emission of light by biological molecules, particularly proteins. The essential condition for bioluminescence is molecular oxygen, either bound or free in the presence of an oxygenase, a luciferase, which acts on a substrate, a luciferin. Bioluminescence is generated by an enzyme or other protein (luciferase) that is an oxygenase that acts on a substrate luciferin (a bioluminescence substrate) in the presence of molecular oxygen and transforms the substrate to an excited state, which, upon return to a lower energy level releases the energy in the form of light.

[0126] As used herein, the substrates and enzymes for producing bioluminescence are generically referred to as luciferin and luciferase, respectively. When reference is made to a particular species thereof, for clarity, each generic term is used with the name of the organism from which it derives such as, for example, click beetle luciferase or firefly luciferase.

[0127] As used herein, luciferase refers to oxygenases that catalyze a light emitting reaction. For instance, bacterial luciferases catalyze the oxidation of flavin mononucleotide (FMN) and aliphatic aldehydes, which reaction produces light. Another class of luciferases, found among marine arthropods, catalyzes the oxidation of Cypridina (Vargula) luciferin and another class of luciferases catalyzes the oxidation of Coleoptera luciferin. Thus, luciferase refers to an enzyme or photoprotein that catalyzes a bioluminescent reaction (a reaction that produces bioluminescence). The luciferases, such as firefly and Gaussia and Renilla luciferases, are enzymes which act catalytically and are unchanged during the bioluminescence generating reaction. The luciferase photoproteins, such as the aequorin photoprotein to which luciferin is non-covalently bound, are changed, such as by release of the luciferin, during bioluminescence generating reaction. The luciferase is a protein, or a mixture of proteins (e.g., bacterial luciferase), that occurs naturally in an organism or a variant or mutant thereof, such as a variant produced by mutagenesis that has one or more properties, such as thermal stability; that differ from the naturally-occurring protein. Luciferases and modified mutant or variant forms thereof are well known. For purposes herein, reference to luciferase refers to either the photoproteins or luciferases.

[0128] Reference, for example, to Renilla luciferase refers to an enzyme isolated from member of the genus Renilla or an equivalent molecule obtained from any other source, such as from another related copepod, or that has been prepared synthetically. It is intended to encompass Renilla luciferases with conservative amino acid substitutions that do not substantially alter activity. Conservative substitutions of amino acids are known to those of skill in this art and can be made generally without altering the biological activity of the resulting molecule. Those of skill in this art recognize that, in general, single amino acid substitutions in non-essential regions of a polypeptide do not substantially alter biological activity (see, e.g., Watson et al. Molecular Biology of the Gene, 4th Edition, 1987, The Benjamin/Cummings Pub. co., p. 224).

[0129] As used herein, bioluminescence substrate refers to the compound that is oxidized in the presence of a luciferase and any necessary activators and generates light. These substrates are referred to as luciferins herein, are substrates that undergo oxidation in a bioluminescence reaction. These bioluminescence substrates include any luciferin or analog thereof or any synthetic compound with which a luciferase interacts to generate light. Typical substrates include those that are oxidized in the presence of a luciferase or protein in a light-generating reaction. Bioluminescence substrates, thus, include those compounds that those of skill in the art recognize as luciferins. Luciferins, for example, include firefly luciferin, Cypridina (also known as Vargula) luciferin (coelenterazine), bacterial luciferin, as well as synthetic analogs of these substrates or other compounds that are oxidized in the presence of a luciferase in a reaction the produces bioluminescence.

[0130] As used herein, capable of conversion into a bioluminescence substrate refers to being susceptible to chemical reaction, such as oxidation or reduction, which yields a bioluminescence substrate. For example, the luminescence producing reaction of bioluminescent bacteria involves the reduction of a flavin mononucleotide group (FMN) to reduced flavin mononucleotide (FMNH₂) by a flavin reductase enzyme. The reduced flavin mononucleotide (substrate) then reacts with oxygen (an activator) and bacterial luciferase to form an intermediate peroxy flavin that undergoes further reaction, in the presence of a long-chain aldehyde, to generate light. With respect to this reaction, the reduced flavin and the long chain aldehyde are bioluminescence substrates.

[0131] As used herein, a bioluminescence generating system refers to the set of reagents required to conduct a bioluminescent reaction. Thus, the specific luciferase, luciferin and other substrates, solvents and other reagents that can be required to complete a bioluminescent reaction form a bioluminescence system. Thus a bioluminescence generating system refers to any set of reagents that, under appropriate reaction conditions, yield bioluminescence. Appropriate reaction conditions refer to the conditions necessary for a bioluminescence reaction to occur, such as pH, salt concentrations and temperature. In general, bioluminescence systems include a bioluminescence substrate, luciferin, a luciferase, which includes enzymes luciferases and photoproteins and one or more activators. A specific bioluminescence system can be identified by reference to the specific organism from which the luciferase derives; for example, the Renilla bioluminescence system includes a Renilla luciferase, such as a luciferase isolated from Renilla or produced using recombinant methods or modifications of these luciferases. This system also includes the particular activators necessary to complete the bioluminescence reaction, such as oxygen and a substrate with which the luciferase reacts in the presence of the oxygen to produce light.

[0132] As used herein, the term “modified” with reference to a gene refers to a gene encoding a gene product, having one or more truncations, mutations, insertions or deletions; to a deleted gene; or to a gene encoding a gene product that is inserted (e.g., into the chromosome or on a plasmid, phagemid, cosmid, and phage), typically accompanied by at least a change in function of the modified gene product or virus.

[0133] As used herein, a “non-essential gene or region” of a virus genome is a location or region that can be modified by insertion, deletion, or mutation without inhibiting the infection life cycle of the virus. Modification of a “non-essential gene or region” is intended to encompass modifications that have no effect on the virus life cycle and modifications that attenuate or reduce the toxicity of the virus, but do not completely inhibit infection, replication and production of new virus.

[0134] As used herein, an “attenuated virus” refers to a virus that has been modified to alter one or more properties of the virus that affect, for example, virulence, toxicity, or pathogenicity of the virus compared to a virus without such modification. Typically, the viruses for use in the methods provided herein are attenuated viruses with respect to the wild-type form of the virus.

[0135] As used herein, an “attenuated LIVP virus” with reference to LIVP refers to a virus that exhibits reduced or less virulence, toxicity or pathogenicity compared to LIVP.

[0136] As used herein, “toxicity” (also referred to as virulence or pathogenicity herein) with reference to a virus refers to the deleterious or toxic effects to a host upon administration of the virus. For an oncolytic virus, such as LIVP, the toxicity of a virus is associated with its accumulation in non-tumorous organs or tissues, which can impact the survival of the host or result in deleterious or toxic effects. Toxicity can be measured by assessing one or more parameters indicative of toxicity. These include accumulation in non-tumorous tissues and effects on viability or health of the subject to whom it has been administered, such as effects on weight.

[0137] As used herein, “reduced toxicity” means that the toxic or deleterious effects upon administration of the virus to a host are attenuated or lessened compared to a host that is administered with another reference or control virus. For purposes herein, exemplary of a reference or control virus with respect to toxicity is the LIVP virus designated GLV-1h68 (described, for example, in U.S. Pat. No. 7,588,767) or a virus that is the same as the virus administered except not including a particular modification that reduces toxicity. Whether toxicity is reduced or lessened can be determined by assessing the effect of a virus and, if necessary, a control or reference virus, on a parameter indicative of toxicity. It is understood that when comparing the activity of two or more different viruses, the amount of virus (e.g. pfu) used in an in vitro assay or administered in vivo is the same or similar and the conditions (e.g. in vivo dosage regime) of the in vitro assay or in vivo assessment are the same or similar. For example, when comparing effects upon in vivo administration of a virus and a control or reference virus the subjects are the same species, size, gender and the virus is administered in the same or similar amount under the same or similar dosage regime. In particular, a virus with reduced toxicity can mean that upon administration of the virus to a host, such as for the treatment of a disease, the virus does not accumulate in non-tumorous organs and tissues in the host to an extent that results in damage or harm to the host, or that impacts survival of the host to a greater extent than the disease being treated does or to a greater extent than a control or reference virus does. For example, a virus with reduced toxicity includes a virus that does not result in death of the subject over the course of treatment.

[0138] As used herein, accumulation of a virus in a particular tissue refers to the distribution of the virus in particular tissues of a host organism after a time period following administration of the virus to the host, long enough for the virus to infect the host's organs or tissues. As one skilled in the art will recognize, the time period for infection of a virus will vary depending on the virus, the organ(s) or tissue(s), the immunocompetence of the host and dosage of the virus. Generally, accumulation can be determined at time points from about less than 1 day, about 1 day to about 2, 3, 4, 5, 6 or 7 days, about 1 week to about 2, 3 or 4 weeks, about 1 month to about 2, 3, 4, 5, 6 months or longer after infection with the virus. For purposes herein, the viruses preferentially accumulate in immunoprivileged tissue, such as inflamed tissue or tumor tissue, but are cleared from other tissues and organs, such as non-tumor tissues, in the host to the extent that toxicity of the virus is mild or tolerable and at most, not fatal.

[0139] As used herein, “preferential accumulation” refers to accumulation of a virus at a first location at a higher level than accumulation at a second location (i.e., the concentration of viral particles, or titer, at the first location is higher than the concentration of viral particles at the second location). Thus, a virus that preferentially accumulates in immunoprivileged tissue (tissue that is sheltered from the immune system), such as inflamed tissue, and tumor tissue, relative to normal tissues or organs, refers to a virus that accumulates in immunoprivileged tissue, such as tumor, at a higher level (i.e., concentration or viral titer) than the virus accumulates in normal tissues or organs.

[0140] As used herein, the terms immunoprivileged cells and immunoprivileged tissues refer to cells and tissues, such as solid tumors, which are sequestered from the immune system. Generally, administration of a virus to a subject elicits an immune response that clears the virus from the subject. Immunoprivileged sites, however, are shielded or sequestered from the immune response, permitting the virus to survive and generally to replicate. Immunoprivileged tissues include proliferating tissues, such as tumor tissues.

[0141] As used herein, “anti-tumor activity” or “anti-tumorigenic” refers to virus strains that prevent or inhibit the formation or growth of tumors in vitro or in vivo in a subject. Anti-tumor activity can be determined by assessing a parameter or parameters indicative of anti-tumor activity.

[0142] As used herein, “greater” or “improved” activity with reference to anti-tumor activity or anti-tumorigenicity means that a virus strain is capable of preventing or inhibiting the formation or growth of tumors in vitro or in vivo in a subject to a greater extent than a reference or control virus or to a greater extent than absence of treatment with the virus. Whether anti-tumor activity is “greater” or “improved” can be determined by assessing the effect of a virus and, if necessary, a control or reference virus, on a parameter indicative of anti-tumor activity. It is understood that when comparing the activity of two or more different viruses, the amount of virus (e.g. pfu) used in an in vitro assay or administered in vivo is the same or similar, and the conditions (e.g. in vivo dosage regime) of the in vitro assay or in vivo assessment are the same or similar.

[0143] As used herein, “genetic therapy” or “gene therapy” involves the transfer of heterologous nucleic acid, such as DNA, into certain cells, target cells, of a mammal, particularly a human, with a disorder or conditions for which such therapy is sought. The nucleic acid, such as DNA, is introduced into the selected target cells, such as directly or in a vector or other delivery vehicle, in a manner such that the heterologous nucleic acid, such as DNA, is expressed and a therapeutic product encoded thereby is produced. Alternatively, the heterologous nucleic acid, such as DNA, can in some manner mediate expression of DNA that encodes the therapeutic product, or it can encode a product, such as a peptide or RNA that in some manner mediates, directly or indirectly, expression of a therapeutic product. Genetic therapy also can be used to deliver nucleic acid encoding a gene product that replaces a defective gene or supplements a gene product produced by the mammalian or the cell in which it is introduced. The introduced nucleic acid can encode a therapeutic compound, such as a growth factor inhibitor thereof, or a tumor necrosis factor or inhibitor thereof, such as a receptor therefor, that is not normally produced in the mammalian host or that is not produced in therapeutically effective amounts or at a therapeutically useful time. The heterologous nucleic acid, such as DNA, encoding the therapeutic product can be modified prior to introduction into the cells of the afflicted host in order to enhance or otherwise alter the product or expression thereof. Genetic therapy also can involve delivery of an inhibitor or repressor or other modulator of gene expression.

[0144] As used herein, the terms overproduce or overexpress when used in reference to a substance, molecule, compound or composition made in a cell refers to production or expression at a level that is greater than a baseline, normal or usual level of production or expression of the substance, molecule, compound or composition by the cell. A baseline, normal or usual level of production or expression includes no production/expression or limited, restricted or regulated production/expression. Such overproduction or overexpression is typically achieved by modification of cell.

[0145] As used herein, a tumor, also known as a neoplasm, is an abnormal mass of tissue that results when cells proliferate at an abnormally high rate. Tumors can show partial or total lack of structural organization and functional coordination with normal tissue. Tumors can be benign (not cancerous), or malignant (cancerous). As used herein, a tumor is intended to encompass hematopoietic tumors as well as solid tumors.

[0146] Malignant tumors can be broadly classified into three major types. Carcinomas are malignant tumors arising from epithelial structures (e.g. breast, prostate, lung, colon, pancreas). Sarcomas are malignant tumors that originate from connective tissues, or mesenchymal cells, such as muscle, cartilage, fat or bone. Leukemias and lymphomas are malignant tumors affecting hematopoietic structures (structures pertaining to the formation of blood cells) including components of the immune system. Other malignant tumors include, but are not limited to, tumors of the nervous system (e.g. neurofibromatomas), germ cell tumors, and blastic tumors.

[0147] As used herein, a disease or disorder refers to a pathological condition in an organism resulting from, for example, infection or genetic defect, and characterized by identifiable symptoms. An exemplary disease as described herein is a neoplastic disease, such as cancer.

[0148] As used herein, proliferative disorders include any disorders involving abnormal proliferation of cells (i.e. cells proliferate more rapidly compared to normal tissue growth), such as, but not limited to, neoplastic diseases.

[0149] As used herein, neoplastic disease refers to any disorder involving cancer, including tumor development, growth, metastasis and progression.

[0150] As used herein, cancer is a term for diseases caused by or characterized by any type of malignant tumor, including metastatic cancers, lymphatic tumors, and blood cancers. Exemplary cancers include, but are not limited to, acute lymphoblastic leukemia, acute lymphoblastic leukemia, acute myeloid leukemia, acute promyelocytic leukemia, adenocarcinoma, adenoma, adrenal cancer, adrenocortical carcinoma, AIDS-related cancer, AIDS-related lymphoma, anal cancer, appendix cancer, astrocytoma, basal cell carcinoma, bile duct cancer, bladder cancer, bone cancer, osteosarcoma/malignant fibrous histiocytoma, brainstem glioma, brain cancer, carcinoma, cerebellar astrocytoma, cerebral astrocytoma/malignant glioma, ependymoma, medulloblastoma, supratentorial primitive neuroectodermal tumor, visual pathway or hypothalamic glioma, breast cancer, bronchial adenoma/carcinoid, Burkitt lymphoma, carcinoid tumor, carcinoma, central nervous system lymphoma, cervical cancer, chronic lymphocytic leukemia, chronic myelogenous leukemia, chronic myeloproliferative disorder, colon cancer, cutaneous T-cell lymphoma, desmoplastic small round cell tumor, endometrial cancer, ependymoma, epidermoid carcinoma, esophageal cancer, Ewing's sarcoma, extracranial germ cell tumor, extragonadal germ cell tumor, extrahepatic bile duct cancer, eye cancer/intraocular melanoma, eye cancer/retinoblastoma, gallbladder cancer, gallstone tumor, gastric/stomach cancer, gastrointestinal carcinoid tumor, gastrointestinal stromal tumor, giant cell tumor, glioblastoma multiforme, glioma, hairy-cell tumor, head and neck cancer, heart cancer, hepatocellular/liver cancer, Hodgkin lymphoma, hyperplasia, hyperplastic corneal nerve tumor, in situ carcinoma, hypopharyngeal cancer, intestinal ganglioneuroma, islet cell tumor, Kaposi's sarcoma, kidney/renal cell cancer, laryngeal cancer, leiomyoma tumor, lip and oral cavity cancer, liposarcoma, liver cancer, non-small cell lung cancer, small cell lung cancer, lymphomas, macroglobulinemia, malignant carcinoid, malignant fibrous histiocytoma of bone, malignant hypercalcemia, malignant melanomas, marfanoid habitus tumor, medullary carcinoma, melanoma, merkel cell carcinoma, mesothelioma, metastatic skin carcinoma, metastatic squamous neck cancer, mouth cancer, mucosal neuromas, multiple myeloma, mycosis fungoides, myelodysplastic syndrome, myeloma, myeloproliferative disorder, nasal cavity and paranasal sinus cancer, nasopharyngeal carcinoma, neck cancer, neural tissue cancer, neuroblastoma, oral cancer, oropharyngeal cancer, osteosarcoma, ovarian cancer, ovarian epithelial tumor, ovarian germ cell tumor, pancreatic cancer, parathyroid cancer, penile cancer, pharyngeal cancer, pheochromocytoma, pineal astrocytoma, pineal germinoma, pineoblastoma, pituitary adenoma, pleuropulmonary blastoma, polycythemia vera, primary brain tumor, prostate cancer, rectal cancer, renal cell tumor, reticulum cell sarcoma, retinoblastoma, rhabdomyosarcoma, salivary gland cancer, seminoma, Sezary syndrome, skin cancer, small intestine cancer, soft tissue sarcoma, squamous cell carcinoma, squamous neck carcinoma, stomach cancer, supratentorial primitive neuroectodermal tumor, testicular cancer, throat cancer, thymoma, thyroid cancer, topical skin lesion, trophoblastic tumor, urethral cancer, uterine/endometrial cancer, uterine sarcoma, vaginal cancer, vulvar cancer, Waldenstrom's macroglobulinemia or Wilm's tumor. Exemplary cancers commonly diagnosed in humans include, but are not limited to, cancers of the bladder, brain, breast, bone marrow, cervix, colon/rectum, kidney, liver, lung/bronchus, ovary, pancreas, prostate, skin, stomach, thyroid, or uterus. Exemplary cancers commonly diagnosed in dogs, cats, and other pets include, but are not limited to, lymphosarcoma, osteosarcoma, mammary tumors, mastocytoma, brain tumor, melanoma, adenosquamous carcinoma, carcinoid lung tumor, bronchial gland tumor, bronchiolar adenocarcinoma, fibroma, myxochondroma, pulmonary sarcoma, neurosarcoma, osteoma, papilloma, retinoblastoma, Ewing's sarcoma, Wilm's tumor, Burkitt's lymphoma, microglioma, neuroblastoma, osteoclastoma, oral neoplasia, fibrosarcoma, osteosarcoma and rhabdomyosarcoma, genital squamous cell carcinoma, transmissible venereal tumor, testicular tumor, seminoma, Sertoli cell tumor, hemangiopericytoma, histiocytoma, chloroma (e.g., granulocytic sarcoma), corneal papilloma, corneal squamous cell carcinoma, hemangiosarcoma, pleural mesothelioma, basal cell tumor, thymoma, stomach tumor, adrenal gland carcinoma, oral papillomatosis, hemangioendothelioma and cystadenoma, follicular lymphoma, intestinal lymphosarcoma, fibrosarcoma and pulmonary squamous cell carcinoma. Exemplary cancers diagnosed in rodents, such as a ferret, include, but are not limited to, insulinoma, lymphoma, sarcoma, neuroma, pancreatic islet cell tumor, gastric MALT lymphoma and gastric adenocarcinoma. Exemplary neoplasias affecting agricultural livestock include, but are not limited to, leukemia, hemangiopericytoma and bovine ocular neoplasia (in cattle); preputial fibrosarcoma, ulcerative squamous cell carcinoma, preputial carcinoma, connective tissue neoplasia and mastocytoma (in horses); hepatocellular carcinoma (in swine); lymphoma and pulmonary adenomatosis (in sheep); pulmonary sarcoma, lymphoma, Rous sarcoma, reticulo-endotheliosis, fibrosarcoma, nephroblastoma, B-cell lymphoma and lymphoid leukosis (in avian species); retinoblastoma, hepatic neoplasia, lymphosarcoma (lymphoblastic lymphoma), plasmacytoid leukemia and swimbladder sarcoma (in fish), caseous lymphadenitis (CLA): chronic, infectious, contagious disease of sheep and goats caused by the bacterium Corynebacterium pseudotuberculosis, and contagious lung tumor of sheep caused by jaagsiekte.

[0151] As used herein, an aggressive cancer refers to a cancer characterized by a rapidly growing tumor or tumors. Typically the tumor(s) is actively metastasizing or is at risk of metastasizing. Aggressive cancer typically refer to metastatic cancers that spread to multiple locations in the body.

[0152] As used herein, an in vivo method refers to any method that is performed within the living body of a subject. As used herein, an in vitro method refers to any method that is performed outside the living body of a subject.

[0153] As used herein, an ex vivo method refers to a method performed on a sample obtained from a subject.

[0154] As used herein, the term “therapeutic virus” refers to a virus that is administered for the treatment of a disease or disorder, such as a neoplastic disease, such as cancer, a tumor and/or a metastasis or inflammation or wound or diagnosis thereof and or both. Generally, a therapeutic virus herein is one that exhibits anti-tumor activity and minimal toxicity.

[0155] As used herein, treatment means ameliorating a disease or a symptom thereof.

[0156] As used herein, treatment of a subject that has a neoplastic disease, including a tumor or metastasis, means any manner of treatment in which the symptoms of having the neoplastic disease are ameliorated or otherwise beneficially altered. Typically, treatment of a tumor or metastasis in a subject encompasses any manner of treatment that results in slowing of tumor growth, lysis of tumor cells, reduction in the size of the tumor, prevention of new tumor growth, or prevention of metastasis of a primary tumor, including inhibition vascularization of the tumor, tumor cell division, tumor cell migration or degradation of the basement membrane or extracellular matrix.

[0157] As used herein, therapeutic effect means an effect resulting from treatment of a subject that alters, typically improves or ameliorates the symptoms of a disease or condition or that cures a disease or condition. A therapeutically effective amount refers to the amount of a composition, molecule or compound which results in a therapeutic effect following administration to a subject.

[0158] As used herein, amelioration or alleviation of the symptoms of a particular disorder, such as by administration of a particular pharmaceutical composition or therapeutic, refers to any lessening, whether permanent or temporary, lasting or transient that can be attributed to or associated with administration of the composition or therapeutic.

[0159] As used herein, efficacy means that upon systemic administration of an oncolytic virus, the virus will colonize tumor cells and replicate. In particular, it will replicate sufficiently so that tumor cells released into circulation will contain virus. Colonization and replication in tumor cells is indicative that the treatment is or will be an effective treatment.

[0160] As used herein, effective treatment with a virus is one that can increase survival compared to the absence of treatment therewith. For example, a virus is an effective treatment if it stabilizes disease, causes tumor regression, decreases severity of disease or slows down or reduces metastasizing of the tumor.

[0161] As used herein, therapeutic agents are agents that ameliorate the symptoms of a disease or disorder or ameliorate the disease or disorder. Therapeutic agents can be any molecule, such as a small molecule, a peptide, a polypeptide, a protein, an antibody, an antibody fragment, a DNA, or a RNA. Therapeutic agent, therapeutic compound, or therapeutic regimens include conventional drugs and drug therapies, including vaccines for treatment or prevention (i.e., reducing the risk of getting a particular disease or disorder), which are known to those skilled in the art and described elsewhere herein. Therapeutic agents for the treatment of neoplastic disease include, but are not limited to, moieties that inhibit cell growth or promote cell death, that can be activated to inhibit cell growth or promote cell death, or that activate another agent to inhibit cell growth or promote cell death. Therapeutic agents for use in the methods provided herein can be, for example, an anticancer agent. Exemplary therapeutic agents include, for example, therapeutic microorganisms, such as therapeutic viruses and bacteria, chemotherapeutic compounds, cytokines, growth factors, hormones, photosensitizing agents, radionuclides, toxins, antimetabolites, signaling modulators, anticancer antibiotics, anticancer antibodies, anti-cancer oligopeptides, anti-cancer oligonucleotide (e.g., antisense RNA and siRNA), angiogenesis inhibitors, radiation therapy, or a combination thereof.

[0162] As used herein, an anti-cancer agent or compound (used interchangeably with “anti-tumor or anti-neoplastic agent”) refers to any agents, or compounds, used in anti-cancer treatment. These include any agents, when used alone or in combination with other compounds or treatments, that can alleviate, reduce, ameliorate, prevent, or place or maintain in a state of remission of clinical symptoms or diagnostic markers associated with neoplastic disease, tumors and cancer, and can be used in methods, combinations and compositions provided herein.

[0163] As used herein, a “chemotherapeutic agent” is any drug or compound that is used in anti-cancer treatment. Exemplary of such agents are alkylating agents, nitrosoureas, antitumor antibiotics, antimetabolites, antimitotics, topoisomerase inhibitors, monoclonal antibodies, and signaling inhibitors. Exemplary chemotherapeutic agent include, but are not limited to, chemotherapeutic agents, such as Ara-C, cisplatin, carboplatin, paclitaxel, doxorubicin, gemcitabine, camptothecin, irinotecan, cyclophosphamide, 6-mercaptopurine, vincristine, 5-fluorouracil, and methotrexate. The term “chemotherapeutic agent” can be used interchangeably with the term “anti-cancer agent” when referring to drugs or compounds for the treatment of cancer. As used herein, reference to a chemotherapeutic agent includes combinations or a plurality of chemotherapeutic agents unless otherwise indicated.

[0164] As used herein, an anti-metastatic agent is an agent that ameliorates the symptoms of metastasis or ameliorates metastasis. Generally, anti-metastatic agents directly or indirectly inhibit one or more steps of metastasis, including but not limited to, degradation of the basement membrane and proximal extracellular matrix, which leads to tumor cell detachment from the primary tumor, tumor cell migration, tumor cell invasion of local tissue, tumor cell division and colonization at the secondary site, organization of endothelial cells into new functioning capillaries in a tumor, and the persistence of such functioning capillaries in a tumor. Anti-metastatic agents include agents that inhibit the metastasis of a cell from a primary tumor, including release of the cell from the primary tumor and establishment of a secondary tumor, or that inhibits further metastasis of a cell from a site of metastasis. Treatment of a tumor bearing subject with anti-metastatic agents can result in, for example, the delayed appearance of secondary (i.e. metastatic) tumors, slowed development of primary or secondary tumors, decreased occurrence of secondary tumors, slowed or decreased severity of secondary effects of neoplastic disease, arrested tumor growth and regression.

[0165] As used herein, an effective amount of a virus or compound for treating a particular disease is an amount that is sufficient to ameliorate, or in some manner reduce the symptoms associated with the disease. Such an amount can be administered as a single dosage or can be administered in multiple dosages according to a regimen, whereby it is effective. The amount can cure the disease but, typically, is administered in order to ameliorate the symptoms of the disease. Repeated administration can be required to achieve the desired amelioration of symptoms.

[0166] As used herein, a compound produced in a tumor refers to any compound that is produced in the tumor or tumor environment by virtue of the presence of an introduced virus, generally a recombinant virus, expressing one or more gene products. For example, a compound produced in a tumor can be, for example, an encoded polypeptide or RNA, a metabolite, or compound that is generated by a recombinant polypeptide and the cellular machinery of the tumor.

[0167] As used herein, the term “ELISA” refers to enzyme-linked immunosorbent assay. Numerous methods and applications for carrying out an ELISA are well known in the art, and provided in many sources (See, e.g., Crowther, “Enzyme-Linked Immunosorbent Assay (ELISA),” in Molecular Biomethods Handbook, Rapley et al. [eds.], pp. 595-617, Hzumana Press, Inc., Totowa, N.J. [1998]; Harlow and Lane (eds.), Antibodies: A Laboratory Manual, Cold Spring Harbor Laboratory Press [1988]; and Ausubel et al. (eds.), Current Protocols in Molecular Biology, Ch. 11, John Wiley & Sons, Inc., New York [1994]; and Newton, et al. (2006) Neoplasia. 8:772-780). A “direct ELISA” protocol involves a target-binding molecule, such as a cell, cell lysate, or isolated protein, first bound and immobilized to a microtiter plate well. A “sandwich ELISA” involves a target-binding molecule attached to the substrate by capturing it with an antibody that has been previously bound to the microtiter plate well. The ELISA method detects an immobilized ligand-receptor complex (binding) by use of fluorescent detection of fluorescently labeled ligands or an antibody-enzyme conjugate, where the antibody is specific for the antigen of interest, such as a phage virion, while the enzyme portion allows visualization and quantitation by the generation of a colored or fluorescent reaction product. The conjugated enzymes commonly used in the ELISA include horseradish peroxidase, urease, alkaline phosphatase, glucoamylase or O-galactosidase. The intensity of color development is proportional to the amount of antigen present in the reaction well.

[0168] As used herein, a delivery vehicle for administration refers to a lipid-based or other polymer-based composition, such as liposome, micelle or reverse micelle, that associates with an agent, such as a virus provided herein, for delivery into a host subject.

[0169] As used herein, a “diagnostic agent” refer to any agent that can be applied in the diagnosis or monitoring of a disease or health-related condition. The diagnostic agent can be any molecule, such as a small molecule, a peptide, a polypeptide, a protein, an antibody, an antibody fragment, a DNA, or a RNA.

[0170] As used herein, a detectable label or detectable moiety or diagnostic moiety (also imaging label, imaging agent, or imaging moiety) refers to an atom, molecule or composition, wherein the presence of the atom, molecule or composition can be directly or indirectly measured. Detectable labels can be used to image one or more of any of the viruses provided herein. Detectable labels can be used in any of the methods provided herein. Detectable labels include, for example, chemiluminescent moieties, bioluminescent moieties, fluorescent moieties, radionuclides, and metals. Methods for detecting labels are well known in the art. Such a label can be detected, for example, by visual inspection, by fluorescence spectroscopy, by reflectance measurement, by flow cytometry, by X-rays, by a variety of magnetic resonance methods such as magnetic resonance imaging (MRI) and magnetic resonance spectroscopy (MRS). Methods of detection also include any of a variety of tomographic methods including computed tomography (CT), computed axial tomography (CAT), electron beam computed tomography (EBCT), high resolution computed tomography (HRCT), hypocycloidal tomography, positron emission tomography (PET), single-photon emission computed tomography (SPECT), spiral computed tomography, and ultrasonic tomography. Direct detection of a detectable label refers to, for example, measurement of a physical phenomenon of the detectable label itself, such as energy or particle emission or absorption of the label itself, such as by X-ray or MRI. Indirect detection refers to measurement of a physical phenomenon of an atom, molecule or composition that binds directly or indirectly to the detectable label, such as energy or particle emission or absorption, of an atom, molecule or composition that binds directly or indirectly to the detectable label. In a non-limiting example of indirect detection, a detectable label can be biotin, which can be detected by binding to avidin. Non-labeled avidin can be administered systemically to block non-specific binding, followed by systemic administration of labeled avidin. Thus, included within the scope of a detectable label or detectable moiety is a bindable label or bindable moiety, which refers to an atom, molecule or composition, wherein the presence of the atom, molecule or composition can be detected as a result of the label or moiety binding to another atom, molecule or composition. Exemplary detectable labels include, for example, metals such as colloidal gold, iron, gadolinium, and gallium-67, fluorescent moieties, and radionuclides. Exemplary fluorescent moieties and radionuclides are provided elsewhere herein.

[0171] As used herein, a radionuclide, a radioisotope or radioactive isotope is used interchangeably to refer to an atom with an unstable nucleus. The nucleus is characterized by excess energy which is available to be imparted either to a newly-created radiation particle within the nucleus, or else to an atomic electron. The radionuclide, in this process, undergoes radioactive decay, and emits a gamma ray and/or subatomic particles. Such emissions can be detected in vivo by method such as, but not limited to, positron emission tomography (PET), single-photon emission computed tomography (SPECT) or planar gamma imaging. Radioisotopes can occur naturally, but also can be artificially produced. Exemplary radionuclides for use in in vivo imaging include, but are not limited to, ¹¹C, ¹¹F, ¹³C, ¹³N, ¹⁵N, ¹⁵0, 18F, ¹⁹F, ³²P, ⁵²Fe, ⁵¹Cr, ⁵⁵Co, ⁵⁵Fe, ⁵⁷Co, ⁵⁸Co, ⁵⁷Ni, ⁵⁹Fe ⁶⁰Co, ⁶⁴Cu, ⁶⁷Ga, ⁶⁸Ga, ⁶⁰Cu(II), ⁶⁷Cu(II), ⁹⁹Tc, ⁹⁰Y, ⁹⁹Tc, ¹⁰³Pd, ¹⁰⁶Ru, ¹¹¹In. ¹¹⁷Lu, ¹²³I, ¹²⁵I, ¹²⁴I, ¹³¹I, ¹³⁷Cs, ¹⁵³Gd, ¹⁵³Sm, ¹⁸⁶Re, ¹⁸⁸Re, ¹⁹²Ir, ¹⁹⁸Au, ²¹¹At, ²¹²Bi, ²¹³Bi and ²⁴¹Am. Radioisotopes can be incorporated into or attached to a compound, such as a metabolic compound. Exemplary radionuclides that can be incorporated or linked to a metabolic compound, such as nucleoside analog, include, but are not limited to, ¹²³I, ¹²⁴I, ¹²⁵I, ¹³¹I, ¹⁸F, ¹⁹F, ¹¹C, ¹³C, ¹⁴C, ⁷⁵Br, ⁷⁶Br, and ³H.

[0172] As used herein, magnetic resonance imaging (MRI) refers to the use of a nuclear magnetic resonance spectrometer to produce electronic images of specific atoms and molecular structures in solids, especially human cells, tissues, and organs. MRI is non-invasive diagnostic technique that uses nuclear magnetic resonance to produce cross-sectional images of organs and other internal body structures. The subject lies inside a large, hollow cylinder containing a strong electromagnet, which causes the nuclei of certain atoms in the body (such as, for example, ¹H, ¹³C and ¹⁹F) to align magnetically. The subject is then subjected to radio waves, which cause the aligned nuclei to flip; when the radio waves are withdrawn the nuclei return to their original positions, emitting radio waves that are then detected by a receiver and translated into a two-dimensional picture by computer. For some MRI procedures, contrast agents such as gadolinium are used to increase the accuracy of the images.

[0173] As used herein, an X-ray refers to a relatively high-energy photon, or a stream of such photons, having a wavelength in the approximate range from 0.01 to 10 nanometers. X-rays also refer to photographs taken with x-rays.

[0174] As used herein, a compound conjugated to a moiety refers to a complex that includes a compound bound to a moiety, where the binding between the compound and the moiety can arise from one or more covalent bonds or non-covalent interactions such as hydrogen bonds, or electrostatic interactions. A conjugate also can include a linker that connects the compound to the moiety. Exemplary compounds include, but are not limited to, nanoparticles and siderophores. Exemplary moieties, include, but are not limited to, detectable moieties and therapeutic agents.

[0175] As used herein, “modulate” and “modulation” or “alter” refer to a change of an activity of a molecule, such as a protein. Exemplary activities include, but are not limited to, biological activities, such as signal transduction. Modulation can include an increase in the activity (i.e., up-regulation or agonist activity), a decrease in activity (i.e., down-regulation or inhibition) or any other alteration in an activity (such as a change in periodicity, frequency, duration, kinetics or other parameter). Modulation can be context dependent and typically modulation is compared to a designated state, for example, the wildtype protein, the protein in a constitutive state, or the protein as expressed in a designated cell type or condition.

[0176] As used herein, an agent or compound that modulates the activity of a protein or expression of a gene or nucleic acid either decreases or increases or otherwise alters the activity of the protein or, in some manner, up- or down-regulates or otherwise alters expression of the nucleic acid in a cell.

[0177] As used herein, “nucleic acids” include DNA, RNA and analogs thereof, including peptide nucleic acids (PNA) and mixtures thereof. Nucleic acids can be single or double-stranded. Nucleic acids can encode gene products, such as, for example, polypeptides, regulatory RNAs, microRNAs, siRNAs and functional RNAs.

[0178] As used herein, a sequence complementary to at least a portion of an RNA, with reference to antisense oligonucleotides, means a sequence of nucleotides having sufficient complementarity to be able to hybridize with the RNA, generally under moderate or high stringency conditions, forming a stable duplex; in the case of double-stranded antisense nucleic acids, a single strand of the duplex DNA (i.e., dsRNA) can thus be assayed, or triplex formation can be assayed. The ability to hybridize depends on the degree of complementarity and the length of the antisense nucleic acid. Generally, the longer the hybridizing nucleic acid, the more base mismatches with an encoding RNA it can contain and still form a stable duplex (or triplex, as the case can be). One skilled in the art can ascertain a tolerable degree of mismatch by use of standard procedures to determine the melting point of the hybridized complex.

[0179] As used herein, a peptide refers to a polypeptide that is greater than or equal to 2 amino acids in length, and less than or equal to 40 amino acids in length.

[0180] As used herein, the amino acids which occur in the various sequences of amino acids provided herein are identified according to their known, three-letter or one-letter abbreviations (Table 1). The nucleotides which occur in the various nucleic acid fragments are designated with the standard single-letter designations used routinely in the art.

[0181] As used herein, an “amino acid” is an organic compound containing an amino group and a carboxylic acid group. A polypeptide contains two or more amino acids. For purposes herein, amino acids include the twenty naturally-occurring amino acids, non-natural amino acids and amino acid analogs (i.e., amino acids wherein the α-carbon has a side chain).

[0182] As used herein, “amino acid residue” refers to an amino acid formed upon chemical digestion (hydrolysis) of a polypeptide at its peptide linkages; The amino acid residues described herein are presumed to be in the “L” isomeric form. Residues in the “D” isomeric form, which are so designated, can be substituted for any L-amino acid residue as long as the desired functional property is retained by the polypeptide. NH2 refers to the free amino group present at the amino terminus of a polypeptide. COOH refers to the free carboxy group present at the carboxyl terminus of a polypeptide. In keeping with standard polypeptide nomenclature described in J. Biol. Chem., 243: 3557-3559 (1968), and adopted 37 C.F.R. §§1.821-1.822, abbreviations for amino acid residues are shown in Table 1:

TABLE 1
Table of Amino Acid Correspondence

| SYMBOL | | |
|---|---|---|
| 1-Letter | 3-Letter | AMINO ACID |
| Y | Tyr | Tyrosine |
| G | Gly | Glycine |
| F | Phe | Phenylalanine |
| M | Met | Methionine |
| A | Ala | Alanine |
| S | Ser | Serine |
| I | Ile | Isoleucine |
| L | Leu | Leucine |
| T | Thr | Threonine |
| V | Val | Valine |
| P | Pro | Proline |
| K | Lys | Lysine |
| H | His | Histidine |
| Q | Gln | Glutamine |
| E | Glu | Glutamic acid |
| Z | Glx | Glu and/or Gln |
| W | Trp | Tryptophan |
| R | Arg | Arginine |
| D | Asp | Aspartic acid |
| N | Asn | Asparagine |
| B | Asx | Asn and/or Asp |
| C | Cys | Cysteine |
| X | Xaa | Unknown or other |

[0183] All amino acid residue sequences represented herein by formulae have a left to right orientation in the conventional direction of amino-terminus to carboxyl-terminus. In addition, the phrase “amino acid residue” is defined to include the amino acids listed in the Table of Correspondence (Table 1) and modified and unusual amino acids, such as those referred to in 37C.F.R. §§1.821-1.822, and incorporated herein by reference. Furthermore, a dash at the beginning or end of an amino acid residue sequence indicates a peptide bond to a further sequence of one or more amino acid residues, to an amino-terminal group such as NH₂ or to a carboxyl-terminal group such as COOH.

[0184] As used herein, the “naturally occurring α-amino acids” are the residues of those 20 α-amino acids found in nature which are incorporated into protein by the specific recognition of the charged tRNA molecule with its cognate mRNA codon in humans. Non-naturally occurring amino acids thus include, for example, amino acids or analogs of amino acids other than the 20 naturally-occurring amino acids and include, but are not limited to, the D-isostereomers of amino acids. Exemplary non-natural amino acids are described herein and are known to those of skill in the art.

[0185] As used herein, the term polynucleotide means a single- or double-stranded polymer of deoxyribonucleotides or ribonucleotide bases read from the 5′ to the 3′ end. Polynucleotides include RNA and DNA, and can be isolated from natural sources, synthesized in vitro, or prepared from a combination of natural and synthetic molecules. The length of a polynucleotide molecule is given herein in terms of nucleotides (abbreviated “nt”) or base pairs (abbreviated “bp”). The term nucleotides is used for single- and double-stranded molecules where the context permits. When the term is applied to double-stranded molecules it is used to denote overall length and will be understood to be equivalent to the term base pairs. It will be recognized by those skilled in the art that the two strands of a double-stranded polynucleotide can differ slightly in length and that the ends thereof can be staggered; thus all nucleotides within a double-stranded polynucleotide molecule may not be paired. Such unpaired ends will, in general, not exceed 20 nucleotides in length.

[0186] As used herein, “similarity” between two proteins or nucleic acids refers to the relatedness between the sequence of amino acids of the proteins or the nucleotide sequences of the nucleic acids. Similarity can be based on the degree of identity and/or homology of sequences of residues and the residues contained therein. Methods for assessing the degree of similarity between proteins or nucleic acids are known to those of skill in the art. For example, in one method of assessing sequence similarity, two amino acid or nucleotide sequences are aligned in a manner that yields a maximal level of identity between the sequences. “Identity” refers to the extent to which the amino acid or nucleotide sequences are invariant. Alignment of amino acid sequences, and to some extent nucleotide sequences, also can take into account conservative differences and/or frequent substitutions in amino acids (or nucleotides). Conservative differences are those that preserve the physico-chemical properties of the residues involved. Alignments can be global (alignment of the compared sequences over the entire length of the sequences and including all residues) or local (the alignment of a portion of the sequences that includes only the most similar region or regions).

[0187] “Identity” per se has an art-recognized meaning and can be calculated using published techniques. (See, e.g. Computational Molecular Biology, Lesk, A. M., ed., Oxford University Press, New York, 1988; Biocomputing: Informatics and Genome Projects, Smith, D. W., ed., Academic Press, New York, 1993; Computer Analysis of Sequence Data, Part I, Griffin, A. M., and Griffin, H. G., eds., Humana Press, New Jersey, 1994; Sequence Analysis in Molecular Biology, von Heinje, G., Academic Press, 1987; and Sequence Analysis Primer, Gribskov, M. and Devereux, J., eds., M Stockton Press, New York, 1991). While there exists a number of methods to measure identity between two polynucleotide or polypeptides, the term “identity” is well known to skilled artisans (Carrillo, H. & Lipton, D., SIAM J Applied Math 48:1073 (1988)).

[0188] As used herein, homologous (with respect to nucleic acid and/or amino acid sequences) means about greater than or equal to 25% sequence homology, typically greater than or equal to 25%, 40%, 50%, 60%, 70%, 80%, 85%, 90% or 95% sequence homology; the precise percentage can be specified if necessary. For purposes herein the terms “homology” and “identity” are often used interchangeably, unless otherwise indicated. In general, for determination of the percentage homology or identity, sequences are aligned so that the highest order match is obtained (see, e.g.: Computational Molecular Biology, Lesk, A. M., ed., Oxford University Press, New York, 1988; Biocomputing: Informatics and Genome Projects, Smith, D. W., ed., Academic Press, New York, 1993; Computer Analysis of Sequence Data, Part I, Griffin, A. M., and Griffin, H. G., eds., Humana Press, New Jersey, 1994; Sequence Analysis in Molecular Biology, von Heinje, G., Academic Press, 1987; and Sequence Analysis Primer, Gribskov, M. and Devereux, J., eds., M Stockton Press, New York, 1991; Carrillo et al. (1988) SIAM J Applied Math 48:1073). By sequence homology, the number of conserved amino acids is determined by standard alignment algorithms programs, and can be used with default gap penalties established by each supplier. Substantially homologous nucleic acid molecules hybridize typically at moderate stringency or at high stringency all along the length of the nucleic acid of interest. Also contemplated are nucleic acid molecules that contain degenerate codons in place of codons in the hybridizing nucleic acid molecule.

[0189] Whether any two molecules have nucleotide sequences or amino acid sequences that are at least 60%, 70%, 80%, 85%, 90%, 95%, 96%, 97%, 98% or 99% “identical” or “homologous” can be determined using known computer algorithms such as the “FASTA” program, using for example, the default parameters as in Pearson et al. (1988) Proc. Natl. Acad. Sci. USA 85:2444 (other programs include the GCG program package (Devereux, J., et al. Nucleic Acids Research 12(I):387 (1984)), BLASTP, BLASTN, FASTA (Altschul, S. F., et al. J Mol Biol 215:403 (1990)); Guide to Huge Computers, Martin J. Bishop, ed., Academic Press, San Diego, 1994, and Carrillo et al. (1988) SIAM J Applied Math 48:1073). For example, the BLAST function of the National Center for Biotechnology Information database can be used to determine identity. Other commercially or publicly available programs include, DNAStar “MegAlign” program (Madison, Wis.) and the University of Wisconsin Genetics Computer Group (UWG) “Gap” program (Madison Wis.). Percent homology or identity of proteins and/or nucleic acid molecules can be determined, for example, by comparing sequence information using a GAP computer program (e.g., Needleman et al. (1970) J. Mol. Biol. 48:443, as revised by Smith and Waterman ((1981) Adv. Appl. Math. 2:482). Briefly, the GAP program defines similarity as the number of aligned symbols (i.e., nucleotides or amino acids), which are similar, divided by the total number of symbols in the shorter of the two sequences. Default parameters for the GAP program can include: (1) a unary comparison matrix (containing a value of 1 for identities and 0 for non-identities) and the weighted comparison matrix of Gribskov et al. (1986) Nucl. Acids Res. 14:6745, as described by Schwartz and Dayhoff, eds., ATLAS OF PROTEIN SEQUENCE AND STRUCTURE, National Biomedical Research Foundation, pp. 353-358 (1979); (2) a penalty of 3.0 for each gap and an additional 0.10 penalty for each symbol in each gap; and (3) no penalty for end gaps.

[0190] Therefore, as used herein, the term “identity” or “homology” represents a comparison between a test and a reference polypeptide or polynucleotide. Such identify is assessed by comparing a sequence of interest to reference sequence.

[0191] As used herein, the term at least “90% identical to” refers to percent identities from 90 to 99.99 relative to the reference nucleic acid or amino acid sequence of the polypeptide. Identity at a level of 90% or more is indicative of the fact that, assuming for exemplification purposes a test and reference polypeptide length of 100 amino acids are compared. No more than 10% (i.e., 10 out of 100) of the amino acids in the test polypeptide differs from that of the reference polypeptide. Similar comparisons can be made between test and reference polynucleotides. Such differences can be represented as point mutations randomly distributed over the entire length of a polypeptide or they can be clustered in one or more locations of varying length up to the maximum allowable, e.g. 10/100 amino acid difference (approximately 90% identity). Differences are defined as nucleic acid or amino acid substitutions, insertions or deletions. At the level of homologies or identities above about 85-90%, the result is independent of the program and gap parameters set; such high levels of identity can be assessed readily, often by manual alignment without relying on software. As used herein, an aligned sequence refers to the use of homology (similarity and/or identity) to align corresponding positions in a sequence of nucleotides or amino acids. Typically, two or more sequences that are related by 50% or more identity are aligned. An aligned set of sequences refers to 2 or more sequences that are aligned at corresponding positions and can include aligning sequences derived from RNAs, such as ESTs and other cDNAs, aligned with genomic DNA sequence.

[0192] As used herein, “primer” refers to a nucleic acid molecule that can act as a point of initiation of template-directed DNA synthesis under appropriate conditions (e.g., in the presence of four different nucleoside triphosphates and a polymerization agent, such as DNA polymerase, RNA polymerase or reverse transcriptase) in an appropriate buffer and at a suitable temperature. It will be appreciated that certain nucleic acid molecules can serve as a “probe” and as a “primer.” A primer, however, has a 3′ hydroxyl group for extension. A primer can be used in a variety of methods, including, for example, polymerase chain reaction (PCR), reverse-transcriptase (RT)-PCR, RNA PCR, LCR, multiplex PCR, panhandle PCR, capture PCR, expression PCR, 3′ and 5′ RACE, in situ PCR, ligation-mediated PCR and other amplification protocols.

[0193] As used herein, “primer pair” refers to a set of primers that includes a 5′ (upstream) primer that hybridizes with the 5′ end of a sequence to be amplified (e.g. by PCR) and a 3′ (downstream) primer that hybridizes with the complement of the 3′ end of the sequence to be amplified.

[0194] As used herein, “specifically hybridizes” refers to annealing, by complementary base-pairing, of a nucleic acid molecule (e.g. an oligonucleotide) to a target nucleic acid molecule. Those of skill in the art are familiar with in vitro and in vivo parameters that affect specific hybridization, such as length and composition of the particular molecule. Parameters particularly relevant to in vitro hybridization further include annealing and washing temperature, buffer composition and salt concentration. Exemplary washing conditions for removing non-specifically bound nucleic acid molecules at high stringency are 0.1×SSPE, 0.1% SDS, 65° C., and at medium stringency are 0.2×SSPE, 0.1% SDS, 50° C. Equivalent stringency conditions are known in the art. The skilled person can readily adjust these parameters to achieve specific hybridization of a nucleic acid molecule to a target nucleic acid molecule appropriate for a particular application. Complementary, when referring to two nucleotide sequences, means that the two sequences of nucleotides are capable of hybridizing, typically with less than 25%, 15% or 5% mismatches between opposed nucleotides. If necessary, the percentage of complementarity will be specified. Typically the two molecules are selected such that they will hybridize under conditions of high stringency.

[0195] As used herein, substantially identical to a product means sufficiently similar so that the property of interest is sufficiently unchanged so that the substantially identical product can be used in place of the product.

[0196] As used herein, it also is understood that the terms “substantially identical” or “similar” varies with the context as understood by those skilled in the relevant art.

[0197] As used herein, an allelic variant or allelic variation references any of two or more alternative forms of a gene occupying the same chromosomal locus. Allelic variation arises naturally through mutation, and can result in phenotypic polymorphism within populations. Gene mutations can be silent (no change in the encoded polypeptide) or can encode polypeptides having altered amino acid sequence. The term “allelic variant” also is used herein to denote a protein encoded by an allelic variant of a gene. Typically the reference form of the gene encodes a wildtype form and/or predominant form of a polypeptide from a population or single reference member of a species. Typically, allelic variants, which include variants between and among species typically have at least 80%, 90% or greater amino acid identity with a wildtype and/or predominant form from the same species; the degree of identity depends upon the gene and whether comparison is interspecies or intraspecies. Generally, intraspecies allelic variants have at least about 80%, 85%, 90% or 95% identity or greater with a wildtype and/or predominant form, including 96%, 97%, 98%, 99% or greater identity with a wildtype and/or predominant form of a polypeptide. Reference to an allelic variant herein generally refers to variations n proteins among members of the same species.

[0198] As used herein, “allele,” which is used interchangeably herein with “allelic variant” refers to alternative forms of a gene or portions thereof. Alleles occupy the same locus or position on homologous chromosomes. When a subject has two identical alleles of a gene, the subject is said to be homozygous for that gene or allele. When a subject has two different alleles of a gene, the subject is said to be heterozygous for the gene. Alleles of a specific gene can differ from each other in a single nucleotide or several nucleotides, and can include modifications such as substitutions, deletions and insertions of nucleotides. An allele of a gene also can be a form of a gene containing a mutation.

[0199] As used herein, species variants refer to variants in polypeptides among different species, including different mammalian species, such as mouse and human. Generally, species variants have 70%, 75%, 80%, 85%, 90%, 91%, 92%, 93%, 94%, 95%, 96%, 97%, 98% or sequence identity. Corresponding residues between and among species variants can be determined by comparing and aligning sequences to maximize the number of matching nucleotides or residues, for example, such that identity between the sequences is equal to or greater than 95%, equal to or greater than 96%, equal to or greater than 97%, equal to or greater than 98% or equal to greater than 99%. The position of interest is then given the number assigned in the reference nucleic acid molecule. Alignment can be effected manually or by eye, particularly, where sequence identity is greater than 80%.

[0200] As used herein, a human protein is one encoded by a nucleic acid molecule, such as DNA, present in the genome of a human, including all allelic variants and conservative variations thereof. A variant or modification of a protein is a human protein if the modification is based on the wildtype or prominent sequence of a human protein.

[0201] As used herein, a splice variant refers to a variant produced by differential processing of a primary transcript of genomic DNA that results in more than one type of mRNA.

[0202] As used herein, modification is in reference to modification of a sequence of amino acids of a polypeptide or a sequence of nucleotides in a nucleic acid molecule and includes deletions, insertions, and replacements (e.g. substitutions) of amino acids and nucleotides, respectively. Exemplary of modifications are amino acid substitutions. An amino-acid substituted polypeptide can exhibit 65%, 70%, 80%, 85%, 90%, 91%, 92%; 93%, 94%, 95%, 96%, 97%, 98% or more sequence identity to a polypeptide not containing the amino acid substitutions. Amino acid substitutions can be conservative or non-conservative. Generally, any modification to a polypeptide retains an activity of the polypeptide. Methods of modifying a polypeptide are routine to those of skill in the art, such as by using recombinant DNA methodologies.

[0203] As used herein, suitable conservative substitutions of amino acids are known to those of skill in this art and can be made generally without altering the biological activity of the resulting molecule. Those of skill in this art recognize that, in general, single amino acid substitutions in non-essential regions of a polypeptide do not substantially alter biological activity (see, e.g., Watson et al. Molecular Biology of the Gene, 4th Edition, 1987, The Benjamin/Cummings Pub. co., p. 224). Such substitutions can be made in accordance with those set forth in Table 2 as follows:

TABLE 2
Table of Exemplary Conservative Amino Acid Substitutions

| Original residue | Exemplary Conservative Substitution |
|---|---|
| Ala (A) | Gly; Ser |
| Arg (R) | Lys |
| Asn (N) | Gln; His |
| Cys (C) | Ser |
| Gln (Q) | Asn |
| Glu (E) | Asp |
| Gly (G) | Ala; Pro |
| His (H) | Asn; Gln |
| Ile (I) | Leu; Val |
| Leu (L) | Ile; Val |
| Lys (K) | Arg; Gln; Glu |
| Met (M) | Leu; Tyr; Ile |
| Phe (F) | Met; Leu; Tyr |
| Ser (S) | Thr |
| Thr (T) | Ser |
| Trp (W) | Tyr |
| Tyr (Y) | Trp; Phe |
| Val (V) | Ile; Leu |

[0204] Other substitutions also are permissible and can be determined empirically or in accord with known conservative substitutions.

[0205] As used herein, the term promoter means a portion of a gene containing DNA sequences that provide for the binding of RNA polymerase and initiation of transcription. Promoter sequences are commonly, but not always, found in the 5′ non-coding region of genes.

[0206] As used herein, isolated or purified polypeptide or protein or biologically-active portion thereof is substantially free of cellular material or other contaminating proteins from the cell or tissue from which the protein is derived, or substantially free from chemical precursors or other chemicals when chemically synthesized. Preparations can be determined to be substantially free if they appear free of readily detectable impurities as determined by standard methods of analysis, such as thin layer chromatography (TLC), gel electrophoresis and high performance liquid chromatography (HPLC), used by those of skill in the art to assess such purity, or sufficiently pure such that further purification would not detectably alter the physical and chemical properties, such as enzymatic and biological activities, of the substance. Methods for purification of the compounds to produce substantially chemically pure compounds are known to those of skill in the art. A substantially chemically pure compound, however, can be a mixture of stereoisomers. In such instances, further purification might increase the specific activity of the compound.

[0207] Hence, reference to a substantially purified polypeptide, refers to preparations of proteins that are substantially free of cellular material includes preparations of proteins in which the protein is separated from cellular components of the cells from which it is isolated or recombinantly-produced. In one example, the term substantially free of cellular material includes preparations of enzyme proteins having less that about 30% (by dry weight) of non-enzyme proteins (also referred to herein as a contaminating protein), generally less than about 20% of non-enzyme proteins or 10% of non-enzyme proteins or less that about 5% of non-enzyme proteins. When the enzyme protein is recombinantly produced, it also is substantially free of culture medium, i.e., culture medium represents less than about or at 20%, 10% or 5% of the volume of the enzyme protein preparation.

[0208] As used herein, the term substantially free of chemical precursors or other chemicals includes preparations of enzyme proteins in which the protein is separated from chemical precursors or other chemicals that are involved in the synthesis of the protein. The term includes preparations of enzyme proteins having less than about 30% (by dry weight), 20%, 10%, 5% or less of chemical precursors or non-enzyme chemicals or components.

[0209] As used herein, synthetic, with reference to, for example, a synthetic nucleic acid molecule or a synthetic gene or a synthetic peptide refers to a nucleic acid molecule or polypeptide molecule that is produced by recombinant methods and/or by chemical synthesis methods.

[0210] As used herein, production by recombinant means or using recombinant DNA methods means the use of the well known methods of molecular biology for expressing proteins encoded by cloned DNA.

[0211] As used herein, a DNA construct is a single- or double-stranded, linear or circular DNA molecule that contains segments of DNA combined and juxtaposed in a manner not found in nature. DNA constructs exist as a result of human manipulation, and include clones and other copies of manipulated molecules.

[0212] As used herein, a DNA segment is a portion of a larger DNA molecule having specified attributes. For example, a DNA segment encoding a specified polypeptide is a portion of a longer DNA molecule, such as a plasmid or plasmid fragment, which, when read from the 5′ to 3′ direction, encodes the sequence of amino acids of the specified polypeptide.

[0213] As used herein, vector (or plasmid) refers to a nucleic acid construct that contains discrete elements that are used to introduce heterologous nucleic acid into cells for either expression of the nucleic acid or replication thereof. The vectors typically remain episomal, but can be designed to effect stable integration of a gene or portion thereof into a chromosome of the genome. Selection and use of such vectors are well known to those of skill in the art.

[0214] As used herein, an expression vector includes vectors capable of expressing DNA that is operatively linked with regulatory sequences, such as promoter regions, that are capable of effecting expression of such DNA fragments. Such additional segments can include promoter and terminator sequences, and optionally can include one or more origins of replication, one or more selectable markers, an enhancer, a polyadenylation signal. Expression vectors are generally derived from plasmid or viral DNA, or can contain elements of both. Thus, an expression vector refers to a recombinant DNA or RNA construct, such as a plasmid, a phage, recombinant virus or other vector that, upon introduction into an appropriate host cell, results in expression of the cloned DNA. Appropriate expression vectors are well known to those of skill in the art and include those that are replicable in eukaryotic cells and/or prokaryotic cells and those that remain episomal or those which integrate into the host cell genome.

[0215] As used herein, the term “viral vector” is used according to its art-recognized meaning. It refers to a nucleic acid vector that includes at least one element of viral origin and can be packaged into a viral vector particle. The viral vector particles can be used for the purpose of transferring DNA, RNA or other nucleic acids into cells either in vitro or in vivo. Viral vectors include, but are not limited to, poxvirus vectors (e.g., vaccinia vectors), retroviral vectors, lentivirus vectors, herpes virus vectors (e.g., HSV), baculovirus vectors, cytomegalovirus (CMV) vectors, papillomavirus vectors, simian virus (SV40) vectors, semliki forest virus vectors, phage vectors, adenoviral vectors and adeno-associated viral (AAV) vectors.

[0216] As used herein equivalent, when referring to two sequences of nucleic acids, means that the two sequences in question encode the same sequence of amino acids or equivalent proteins. When equivalent is used in referring to two proteins or peptides, it means that the two proteins or peptides have substantially the same amino acid sequence with only amino acid substitutions that do not substantially alter the activity or function of the protein or peptide. When equivalent refers to a property, the property does not need to be present to the same extent (e.g., two peptides can exhibit different rates of the same type of enzymatic activity), but the activities are usually substantially the same.

[0217] As used herein, a composition refers to any mixture. It can be a solution, suspension, liquid, powder, paste, aqueous, non-aqueous or any combination thereof.

[0218] As used herein, a combination refers to any association between or among two or more items. The combination can be two or more separate items, such as two compositions or two collections, can be a mixture thereof, such as a single mixture of the two or more items, or any variation thereof. The elements of a combination are generally functionally associated or related.

[0219] As used herein, a kit is a packaged combination, optionally, including instructions for use of the combination and/or other reactions and components for such use.

[0220] As used herein, the singular forms “a,” “an” and “the” include plural referents unless the context clearly dictates otherwise.

[0221] As used herein, ranges and amounts can be expressed as “about” or “approximately” a particular value or range. “About” or “approximately” also includes the exact amount. Hence, “about 5 milliliters” means “about 5 milliliters” and also “5 milliliters.” Generally “about” includes an amount that would be expected to be within experimental error.

[0222] As used herein, “about the same” means within an amount that one of skill in the art would consider to be the same or to be within an acceptable range of error. For example, typically, for pharmaceutical compositions, within at least 1%, 2%, 3%, 4%, 5% or 10% is considered about the same. Such amount can vary depending upon the tolerance for variation in the particular composition by subjects.

[0223] As used herein, “optional” or “optionally” means that the subsequently described event or circumstance does or does not occur, and that the description includes instances where said event or circumstance occurs and instances where it does not.

[0224] As used herein, the abbreviations for any protective groups, amino acids and other compounds, are, unless indicated otherwise, in accord with their common usage, recognized abbreviations, or the IUPAC-IUB Commission on Biochemical Nomenclature (see, (1972) Biochem. 11:1726).

### B. OVERVIEW

[0225] Metastasis involves the formation of progressively growing tumor foci at sites secondary to a primary lesion (Yoshida et al. (2000) J. Natl. Cancer Inst. 92(21):1717-1730; Welch et al. (1999) J. Natl. Cancer Inst. 91:1351-1353) and is a major cause of morbidity and mortality in human malignancies (Nathoo et al. J. Clin. Pathol. 58:237-242 (2005); Fidler et al. Cell 79:185-188 (1994)). In vivo metastasis follows a series of steps known as the metastatic cascade, in which tumor cells invade local tissue, intravasate through the bloodstream or lymphatics as emboli or single tumor cells (i.e. circulating tumor cells (CTCs)), and are transported to secondary sites, where they can lodge into the microvasculature and form metastatic lesions (Kauffman et al. (2003) J. Urology 169:1122-1133).

[0226] Methods for detecting metastasis include histological examination of tissue biopsies of the lymph nodes and other organs for evidence of tumor cell invasion and tumor biopsies for evaluation and grading of tumor differentiation. Such methods include morphological evaluation of tumor cells and immunostaining with tumor cell markers. While such information is useful in diagnosis and prescribing treatment, tissue biopsies are invasive procedures that can be painful, risky, and costly to the patient. In addition, in order to determine changes in the cancer over time and over the course of treatment, multiple biopsies are required, subjecting patients multiple painful and inconvenient procedures. MRI, CT and PET scanning procedures also are routinely used for monitoring location of tumors and tumor size, but these procedures also can be costly and are limited to detection of tumors that are greater than 2-3 mm in size. Thus, a metastatic tumor may not be detected until well after widespread metastasis of the primary tumor has occurred which decreases the chances of successful treatment of the cancer.

[0227] Provided herein are methods to detect tumor cells in body fluid samples and the use of such methods in various applications. Included among the applications are methods for diagnosis and treatment metastasis based on the detection and enumeration of circulating tumor cells (CTCs). The methods are exploit the ability of oncolytic viruses, such as the LIVP vaccinia virus, to preferentially infect metastatic tumor cells in vivo in a subject and ex vivo in a bodily sample from a subject. Using modified oncolytic viruses that encode a detectable reporter protein to detect CTCs provides superior prognostic and treatment selection information compared to other methods of detecting metastasis, including other available methods of detecting CTCs. As described herein, the oncolytic reporter viruses also can be used in combination with available tumor cell enrichment methods to provide convenient and reliable detection of CTCs without the need for additional processing steps which can damage samples obtained for analysis.

[0228] The methods provided herein are useful for, but not limited to, diagnosis of a cancer and/or metastases, staging of cancers, providing a cancer prognosis, predicting or diagnosing cancer recurrence, classification of patients for selection of an anti-cancer therapy, such as an oncolytic virus therapy, and monitoring therapy of a cancer. Among the methods provided are point of care diagnostic methods that can easily be performed in the clinic for detection of CTCs in a sample.

[0229] As described herein, it is found herein that subjects administered oncolytic reporter viruses produced CTCs detectable in the peripheral blood that were infected with the virus. Accordingly, the oncolytic reporter viruses can be employed for ex vivo detection and enumeration of CTCs in a sample, such as a tissue or body fluid sample, from a subject treated with the oncolytic reporter virus. In addition, the oncolytic reporter viruses also can be employed for in vivo detection and enumeration of CTCs in a subject treated with the oncolytic reporter virus.

[0230] As described herein, it also is found herein that an oncolytic reporter virus can provide high-throughput, specific and sensitive detection of CTCs in a sample when used in combination with one or more in vitro tumor cell enrichment methods for detection and enumeration of CTCs. Accordingly, the oncolytic reporter viruses can be employed for ex vivo detection and enumeration of CTCs in a sample, such as a tissue or body fluid sample, where the sample is processed by a tumor cell enrichment method in combination with infection with the oncolytic reporter virus for detection.

[0231] In exemplary methods described herein, the oncolytic reporter viruses can be used for the detection of cancer or detection of metastasis of a cancer. In some examples the oncolytic reporter virus is an oncolytic vaccinia virus, such as an LIVP vaccinia virus. The viruses can be used to infect a sample from a subject that has cancer, is suspected of having cancer, or is at risk of having cancer. Detection of infected cells in the sample indicates that the subject has cancer and/or active metastasis. In exemplary methods, the sample can be processed by a tumor cell enrichment method prior to, following, or concurrent with virus infection of the sample.

[0232] In other exemplary methods, a subject that has cancer, is suspected of having cancer, or is at risk of having cancer can be administered an oncolytic reporter virus and detection of the tumor cells is performed. Detection of infected cancer cells can be performed in vivo in the subject or ex vivo in a sample from the subject. In some examples, an ex vivo sample can be processed by a tumor cell enrichment method prior to detection of the infected tumor cells.

[0233] As described herein, vaccinia virus treatment of a subject with a metastasizing tumor also results in a significant reduction in the number and size of secondary metastases reduces the number of CTCs found in the blood (see, e.g., Examples 9 and 12 provided herein). Accordingly, oncolytic viruses, such as vaccinia virus, provide a means for detecting and enumerating CTCs in a subject and also can provide simultaneous treatment of the metastatic disease.

[0234] Also provided herein are combinations and kits that contain an oncolytic reporter virus (for example, any provided herein below in Section C), and optionally, other accompanying materials and reagents for use in practicing the methods, including materials and reagents for performing a tumor cell enrichment method, and selecting, monitoring and/or treating cancer.

[0235] 1. Circulating Tumor Cells (CTCs) as Cancer Prognostic and Diagnostic Indicators

[0236] Circulating tumor cells were first observed in blood samples of deceased patients with advanced cancers as early as 1869 (Ashworth (1869) Aust Med J 14:146-149). More recently, studies on clinical samples, particularly in breast, colon and prostate cancer patients, have shown a correlation between the presence of CTCs in the peripheral blood and cancer prognosis. Detection of CTCs is predictive of metastatic disease, and the quantity of CTCs detected correlates with the severity of metastatic disease. The presence of CTCs in patient samples after therapy also has been associated with tumor progression and spread, poor response to therapy, relapse of disease, and/or decreased survival over a period of several years. Detection of CTCs can provide a means for early detection and treatment of metastatic disease and monitoring of disease therapy.

[0237] Detection and enumeration of CTCs in fluid samples from a patient, i.e. a “liquid biopsy”, such as a lymph or blood sample, is much less invasive than a tissue biopsy, and can be repeated frequently, allowing real-time monitoring of cancer progression and response to treatment. In addition, detection and enumeration of CTCs offers a convenient means to stratify patients for baseline characteristics that predict initial risk and subsequent risk based upon response to therapy.

[0238] Because circulating tumor cells (CTCs) have the potential to form tumors and their quantity in circulation correlates with metastatic disease, the ability to accurately identify and quantify CTCs in patient samples would aid in the early diagnosis and prognosis of many types of cancers and the monitoring of cancer treatments. Effective detection of CTCs in bodily samples, such as in the blood, lymph or other bodily fluids, also will aid in staging of particular tumors and evaluating metastatic activity.

[0239] Leptomeningeal metastases (LM) result from the spread of metastatic tumor cells to the cerebrospinal fluid (CSF) and leptomeninges. The incidence of LM in cancer patients ranges between 5 and 15% and is on the rise as the survival of cancer patients increases. LM are underdiagnosed since some metastases may remain asymptomatic. The prognosis for patients with LM is extremely poor with the median survival measured in months. Treatment of LM is mainly palliative. Early diagnosis and effective treatment are critical to prevent important neurological deficits, improve quality of life and prolong survival. Methods for the diagnosis of LM include clinical examination, neuroimaging, and CSF analysis. LM is diagnosed by cytological examination of the CSF, a method with limited sensitivity and specificity. Methods are provided herein to detect and diagnose LM, and also to effect treatment thereof.

[0240] Peritoneal carcinomatosis (PC) is the locoregional progression of cancers of gastrointestinal and gynecological origins. At the time of diagnosis, about 10 to 15% of patients with gastrointestinal and gynecological cancers have already developed PC, a terminal condition and a consequence of the underlying systemic nature of the disease (see, e.g., Spiliotis (2010) Hepatogastroenterology 57:1173-1177). Treatment with cytoreductive surgery (CRS), followed by hyperthermic intraperitoneal chemotherapy (HIPEC) has demonstrated a survival benefit, but this treatment is expensive and is associated with a very high postoperative morbidity rate, ranging from 25 to 56% (Spiliotis (2010) Hepatogastroenterology 57:1173-1177). As exemplified herein, oncolytic viruses and the methods provided herein effect detection of LM and PC. In addition, the oncolytic virus infects and eliminates tumor cells in LM and PC.

[0241] 2. Existing Methods for Detection of CTCs

[0242] In patients with metastatic cancer, an estimated 1 million tumor cells per day per gram weight of a primary or secondary tumor are shed into the circulation; however, the half-life of most CTCs in circulation is short in vivo (˜1.0-2.4 hours). Thus, the effective levels of viable CTCs in circulation is low. In addition, detection of CTCs in patient blood samples is difficult due to the low concentration of CTCs relative to other blood components such as erythrocytes and leukocytes. It is estimated that ˜1-3 CTCs among a background of approximately 1×10⁹ erythrocytes and 1×10⁶ leukocytes are present in the blood of cancer patients with metastatic cancers.

[0243] In order to be effective, methods to identify CTCs require high throughput, high specificity, and high sensitivity. Because CTCs are present in low concentrations in bodily samples, such as blood, high throughput methods that can process larger samples in a reasonable amount of time following collection increase the chances of viable CTCs being present and detected in a particular sample; high specificity for CTC detection prevents or significantly decreases the detection of false positives (i.e. categorization of cells as CTCs that are not actually CTCs); and high sensitivity increases the probability that CTCs present in a sample will be detected.

[0244] Various methods to detect CTCs in patients have been developed. These methods include indirect and direct methods of measuring levels of CTCs in a sample.

[0245] Indirect methods of detecting CTCs include detection of CTC specific markers in patient fluid samples by methods such as reverse transcription-polymerase chain reaction (RT-PCR), quantitative RT-PCR (qRT-PCR), and nested RT-PCR. Because these methods rely on pooled samples of cells for detection of marker expression, they do not detect CTCs individually; morphological and quantitive analysis of the cells and confirmation of tumor cell identity cannot be performed.

[0246] Direct methods involve positive or negative selection of CTCs based on physical or biological properties of the CTCs. Such methods include selection for expression of CTC-specific cell surface markers and/or removal of non-tumor cells (e.g. normal blood cells) from samples. A majority of metastatic tumors are epithelial in origin which allows CTCs to be distinguished from other non-CTC cell types, such as, for example, blood cells. Some available methods of CTC isolation employ immuno-mediated enrichment based on expression of epithelial cell specific markers, such as epithelial cell adhesion molecule (EpCAM/CD326) and cytokeratin (CK), which are expressed on the cell surface of many epithelial malignancies. For example, the CellSearch (Veridex, Raritan, N.J.) system and the Magnetic Activated Cell Sorting (MACS) EpCAM-MicroBeads system (Miltenyi Biotech) use immunomagnetic capture of CTCs using magnetic beads coated with anti-EpCAM antibodies. CTCs that bind to the antibodies are captured under a magnetic field. Other methods of positive selection based on cell surface markers include laser scanning cytometry and micro-fluidic chips with surfaces coated with EpCAM. Additional characterization of the captured cells is required to confirm identity of the cells and generally involves staining with 4′,6-diamidino-2-phenylindole (DAPI) to show that the cell is nucleated, immunofluorescence with antibodies against cytokeratin to confirm that the captured cell is an epithelial cell, and negative CD45 staining to demonstrate that the captured cell is not a leukocyte. Magnetic bead-based systems require multiple preparatory steps, including centrifugation, washing, and incubation steps that often result in loss, induction of cell death, or destruction of a significant proportion of cells. Such aggressive multistep batch purification isolation procedures tend to generate low yield, purity and viability of CTCs.

[0247] Methods that use antibodies to capture CTCs also are prone to bias due to selection of only those circulating tumor cells bearing the surface markers for which the antibodies are specific. Not all circulating tumor cells express EpCAM. During induction of epithelial to mesenchymal transition (EMT) which facilitates cell migration during metastasis, EpCAM and cytokeratin (CK) are downregulated. Thus, tumor cells that have that entered circulation following extravasation may express low or no EpCAM or CK and may not be identified in such immunocapture methods. The method is thus subject to large range in recovery rates due to variable expression of the cell surface markers. In order to increase the overall capture of CTCs, such methods can be used in conjunction with other CTC enrichment methods, such as size-based capture.

[0248] Additional examples of methods to identify CTCs include removal of non-tumor cells from the sample. For example, some methods employ immunocapture of leukocytes from a sample using anti-CD45 antibodies and/or targeted lysis of red blood cells, which leaves nucleated cells in the sample. These procedures enrich the proportion of CTCs in the sample relative to non-tumor cells, thus allowing for easier analysis of the remaining cells. Following removal of non-tumor cells, the CTCs are typically detected by immunostaining.

[0249] Other direct methods of CTC isolation include methods that separate tumor cells based on physical properties of CTCs, such as by size, stiffness, and deformability of CTCs. Such methods include, for example, cell microfiltration systems. Examples of microfiltration methods include using microfilters with arrays of openings of a predetermined shape and size (˜8-14 μm) to prevent passage of tumor cells through the microfilter while allowing the smaller cells, for example, red and white blood cells in a blood sample, to pass through (e.g. Isolation by Size of Epithelial Tumor cells, ISET; CellSieve™ microfilters (Creatv Microtech)). These methods offer high throughput capabilities and low cost. Because these methods rely solely on cell size or other physical properties they can often lack sensitivity and specificity for CTCs. Membrane microfilters, for example, can process large volumes of blood (˜9-18 ml) with about 85% recovery of CTCs in the sample, though large number of leukocytes are often retained as well. Thus, additional CTC specific detection procedures are required to detect the CTCs in the pool of retained cells.

[0250] Additional filtration-type methods employ microfluidic chips that contain arrays of cell traps that inhibit passage of tumor cells based on properties unique to or characteristic of CTCs, such as, but not limited to, shear modulus, stiffness, size and/or deformability. Exemplary of such chips is the CTChip® chip (Clearbridge Biomedics Pte Ltd., Singapore; see also, Tan S. J. et al. (2009) Biomedical Microdevices 11(4): 883-892 and Tan et al. (2010) Biosens and Bioelect 26:1701-1705; see, also International PCT application No WO 2011/109762). CTCs, which are larger and stiffer are retained in the traps on the chips while the more deformable non-tumor cells, e.g. blood cells, pass through.

[0251] Density gradient methods, such as Ficoll density gradient separation and OncoQuick (Hexyl Gentech/Geiner Bio-One), enrich CTCs based on their lower buoyant density (<1.077 g/ml). The Ficoll density gradient method includes the steps od passing blood samples through a Ficoll gradient in a one step centrifugation. The upper mononucleocyte (MNC) fraction contains mononuclear blood cells as well as the CTCs. Following isolation of this layer, subsequent immunostaining with epithelial cell markers is generally required to positively identify CTCs. The OncoQuick method employs discontinuous gradient cell separation medium overlayed with a porous barrier. During centrifugation, the medium moves up through the porous barrier, while mononuclear cells move downward through the barrier and become trapped below the barrier. The OncoQuick provides a more enriched sample of CTCs compared to traditional Ficoll density gradient separation because contaminating mononuclear cells are depleted from the CTC fraction. The OncoQuick density gradient separation can produce a CTC fraction containing about 9.5×10⁴ mononuclear cells compared to 1.8×10⁷ mononuclear cells in the Ficoll density gradient separation for a 10 mL blood sample (Gertler et al. (2003) Recent Results Cancer Res. 162:149-55). As with Ficoll density gradient separation, the OncoQuick enriched sample still requires detection of CTCs by immunostaining.

[0252] CTCs that have been isolated by available direct isolation methods, such as those described herein, all generally require some method of detection to confirm that the isolated cells are CTCs. Such methods typically involve immunostaining for epithelial cell and other tumor cell markers, fluorescence in situ hybridization (FISH) and/or morphological analysis. Analysis of individual cells can be time consuming and difficult to automate. In addition, antibody staining procedures often involve multiple binding and washing steps which can damage the cells or cause loss of viable cells. Immunostaining with fluorophore-conjugated antibodies can be used to fluorescently label cells, and detection of a fluorescent signal can be automated. There, however, are problems associated with cell loss and variable detection.

[0253] In vivo methods of detecting CTCs also are available, including quantitation by intravital flow cytometry (see, e.g., He et al. (2007) Proc. Natl. Acad. Sci. USA 104(28):11760-11765). Effective in vivo methods for quantification of CTCs are highly desirable because it allows scanning of larger volumes of body fluids for the rare circulating cells. Scanning of larger volumes of blood can increase the statistical significance of the method and provide more accurate quantitation of rare events (<1 CTC per ml). For example, the entire blood volume content circulating in a subject could be scanned by scanning CTCs as they pass through the peripheral vasculature. Currently available in vivo methods rely on the administration of labeled antibodies and other detectable ligands or substrates (e.g., folate-FITC, folate-AlexaFluor 488, and folate rhodamine) that either specifically bind to or are taken up by the tumor cells. Detection is accomplished by fluorescence or radiographic scanning of surface blood vessels to detect the labeled agent bound to the circulating tumor cells. Such methods require high specificity binding of the reagent in vivo, and administration of high doses of the agent in order to ensure that the rare tumor cells are exposed to the reagent. Such high doses of detectable agents, for example, conjugated fluorescent dyes, can cause toxicity in the subject.

[0254] In general, there is considerable variability in the numbers of CTCs that are detected among the different currently available CTC detection methods, which is likely due to the variability in the nature of the methods for detection, differences in the sensitivity and specificity for CTCs, and reproducibility of the methods. Because of the lack of standardization in the field, implementing CTC detection into clinical practice in making treatment decisions has yet not been achieved. Several existing tumor enrichment methods described above are effective for capturing CTCs, but are ineffective in detecting CTCs due to the disadvantages of immunostaining and/or time consuming cell analysis. As described herein, oncolytic reporter viruses can obviate these problems by providing a means to detect CTCs without the need for additional staining procedures and extensive washing steps. The methods provided herein exploit the property of oncolytic viruses, such as vaccinia virus, to preferentially infect CTCs versus non-tumor cells. Infection of CTCs by oncolytic viruses does not rely on expression of a CTC specific marker and thus is not susceptible to the variable expression of these genes during metastasis.

[0255] Among the methods provided herein are improved methods for detecting CTCs in a sample using a combination of a tumor cell enrichment method with an oncolytic reporter virus for detection. Also among the methods provided herein are improved for detecting CTCs in vivo by administering oncolytic reporter viruses which eliminate the need for CTC-specific antibodies or other ligands which can be difficult to generate and/or are toxic.

[0256] 3. Infection of Metastatic Cells and Cancer Stem Cells by Oncolytic Viruses

[0257] As described herein and in the examples provided herein, oncolytic viruses, such as LIVP vaccinia viruses, exhibit a preference for infecting metastasizing cells and metastatic tumors (see, e.g., Examples 5-10). In a mouse xenograft model of prostate cancer metastasis, vaccinia virus that was administered systemically to the tumor-bearing mouse infected and replicated in the primary tumor and also infected and replicated in migrating metastatic cells in lymphatic vessels and secondary lymph node metastases. Infection of the primary tumor and metastases was detectable via expression of a reporter gene encoded by the virus. Analysis of the excised metastatic lymph node tumors indicated that higher virus titer was present in the metastatic lymph node tumors that arose at later time points, indicating a preference for infection and/or replication of metastasizing tumor cells. Higher blood vessel density was observed at the sites of metastasis which can contribute to increased access of the virus to the metastasizing cells. Accordingly, such viruses can be used to monitor the real-time metastatic spread of a tumor.

[0258] In addition to the colonizing migrating metastatic cells in the lymphatic vessels, vaccinia virus also was found in over 78% of CTCs isolated from the peripheral blood of the tumor-bearing mice at one week following virus infection, as detected by expression of the reporter gene encoded by the virus in purified CTCs, isolated on a size-based CTC chip (e.g., the CTChip® chip (Clearbridge Biomedics Pte Ltd., Singapore; see, also, Tan S. J. et al. (2009) Biomedical Microdevices 11(4): 883-892 and Tan et al. (2010) Biosens and Bioelect 26:1701-1705; see, also International PCT application No WO 2011/109762). Vaccinia virus normally is rapidly cleared from the blood stream and non-tumor tissues following intravenous infection. Circulating CTCs also have a short half life in circulation. Thus, detection of infected CTCs at one week following infection indicates that the detected CTCs are likely tumor cells shed from the infected tumor. Oncolytic viruses, such as vaccinia virus, can thus be employed for the detection of CTCs that are shed from a metastasizing tumor.

[0259] In preclinical models, cancer stem cells are highly invasive and exhibit metastatic properties. As described herein, oncolytic viruses such as LIVP vaccinia virus exhibit increased infection and/or replication in subpopulations of tumor cells displaying cancer stem cell properties (e.g. expression of cancer stem cell markers, such as aldehyde dehydrogenase (ALDH1) and CD44) and higher tumorigenic potential and in tumor cells that have undergone epithelial mesenchymal transition (EMT) (see, e.g. Examples 28, 29, 33 and 36). For example, in GI-101A breast cancer cell lines, ALDH1⁺ cells display properties of cancer stem cells, including higher invasiveness, tumorigenic potential and chemotherapeutic and ionizing radiation resistance compared to ALDH1⁻ cells. It is shown herein that oncolytic viruses, such as vaccinia viruses, exhibit enhanced replication in ALDH¹⁺ cells and selective targeting and tumor regression in ALDH1⁺ cell derived tumors. These data indicate that LIVP vaccinia viruses exhibit preferential infection and/or replication in tumor cell populations that have higher potential for forming tumors in vivo. Thus, oncolytic viruses such as LIVP vaccinia viruses provide a means for more specific identification of tumorigenic CTCs over other methods. Thus, the number of CTCs identified by oncolytic viruses such as LIVP vaccinia viruses can have higher clinical relevance compared to numbers of CTCs selected by other methods in the art.

[0260] Current methods for detection of CTCs lack specificity, sensitivity or involve labor intensive processing steps that result in the loss of CTCs. As described herein, oncolytic reporter viruses exhibit preferential infection and/replication in tumor cells, including metastatic tumor cells, in vivo in a subject and ex vivo in a sample, and can be employed in methods of detecting and enumerating CTCs that are shed from primary tumors. The oncolytic virus effectively labels the metastatic cells, and labeled cells can be detected upon shedding into the circulatory system, other bodily fluids, or disseminated into the bone marrow.

[0261] Accordingly, provided herein are methods of detecting CTCs that use oncolytic reporter viruses for infection and detection of CTCs in vivo in a subject and ex vivo in a sample from a subject. The oncolytic viruses can be used alone or in combination with one or more methods of enrichment of CTCs. By combining tumor cell enrichment methods that maximize the level of CTCs retained in a sample with the tumor cell detection capabilities of oncolytic reporter viruses, high throughput of samples and high specificity and high sensitivity CTC detection can be achieved. Further, the specificity and ability of oncolytic viruses, such as LIVP vaccinia virus, to infect metastasizing cells in vivo demonstrates that such viruses can be administered for in vivo detection and ex vivo detection in samples, such as from subjects undergoing oncolytic virus therapy.

### C. METHODS FOR DETECTING CIRCULATING TUMOR CELLS USING ONCOLYTIC REPORTER VIRUSES

[0262] The methods provided herein for the detection of circulating tumor cells (CTCs) are based on the ability of oncolytic viruses to preferentially infect tumor cells, including CTCs, in vitro and in vivo, compared to non-tumor cells. In particular, it is described herein that oncolytic viruses, including, for example, vaccinia viruses, such as LIVP vaccinia viruses, exhibit preferential replication in tumor cell subpopulations with high tumorigenic potential, including cancer stem cells, EMT-induced tumor cells, and in vivo metastasizing cells.

[0263] According to the methods provided herein, the oncolytic reporter viruses can infect CTCs, and the infected CTCs can be easily detected via expression of a reporter gene encoded by the virus. In some examples, the oncolytic reporter virus infects the tumor cells of a primary tumor in vivo, and the CTCs that are shed from the tumor are infected CTCs that can be detected. Methods of detection of reporter genes are known in the art and can be performed in vivo in a subject or ex vivo with a sample. Accordingly, the methods provided herein for detecting one or more CTCs using oncolytic reporter viruses can be performed in vivo or ex vivo. The methods provided herein for detecting one or more CTCs in vivo in a subject or ex vivo in a sample involve evaluating the preferential infection of CTCs by the oncolytic virus via detection expression of a reporter gene encoded by the virus, thereby identifying the CTCs. In particular examples, the oncolytic reporter virus is an oncolytic vaccinia virus, such as an LIVP vaccinia virus.

[0264] The methods provided herein for detection of a circulating tumor cell (CTC) encompass ex vivo detection of CTCs in a sample from a subject or in vivo detection of CTCs in a subject using an oncolytic reporter virus encoding a reporter gene. In some examples, a method for detection of CTCs includes infection of a sample from a subject with an oncolytic reporter virus, such as an oncolytic vaccinia virus encoding a reporter gene, and then detecting the expressed reporter protein by the infected cells in the sample, thereby detecting the CTCs. In some examples, a method for detection of CTCs includes detecting CTCs in a sample, where the sample is from a subject treated with an oncolytic reporter virus, such as an oncolytic vaccinia virus encoding a reporter gene, and detection involves detection of the expressed reporter protein by the infected cells in the sample, thereby detecting the CTCs. In some examples, a method for detection of CTCs includes administering an oncolytic reporter virus, such as an oncolytic vaccinia virus encoding a reporter gene, to a subject and then detecting the reporter protein expressed by the infected cells in vivo, thereby detecting the CTCs in the subject.

[0265] Among the methods provided herein are methods that increase the sensitivity and specificity of CTC detection in a sample. As described herein, using oncolytic reporter viruses for CTC detection obviates the need for staining procedures that can cause loss of CTCs in a sample, produce false positives or lack sensitivity for detecting tumorigenic CTCs. The use of oncolytic viruses for CTC detection can improve the detection capabilities of existing tumor cell enrichment methods. In some examples, the CTCs are detected using a combination of a tumor cell enrichment method and infection with an oncolytic reporter virus, such as an oncolytic vaccinia virus encoding a reporter gene. For example, in some examples, the sample is first processed using a tumor cell enrichment method to enrich or concentrate the CTCs in the sample, and then the CTC enriched sample is infected with the vaccinia virus for detection of CTCs by detection of the expressed reporter protein. In other examples, the sample is first infected with an oncolytic reporter virus, such as an oncolytic vaccinia virus encoding a reporter gene, and then the infected sample is processed using a tumor cell enrichment method, where the CTCs are detected by detection of the expressed reporter protein. In some examples, one tumor cell enrichment method is employed. In some examples, two or more tumor cell enrichment methods are employed. The sample can be infected with the oncolytic reporter virus before or during or subsequent to performing one or more tumor cell enrichment methods on the sample.

[0266] A tumor cell enrichment method can involve positive selection and/or negative selection methods to enrich for CTCs in the sample. For example, the tumor cell enrichment method can involve selection and separation of tumor cells from non-tumor cells and other components of the sample (i.e. positive selection) and/or can involve selection and removal of non-tumor cells or other components from the sample (i.e. negative selection). Positive selection of tumor cells can be based on any property of the cells including, but not limited, physical properties, such as, for example, size, stiffness, density, shear modulus, or deformability, or biological properties, such as the expression of a tumor cell specific marker or cell invasiveness. Using an oncolytic reporter virus for detection of CTCs enriched in a sample using a tumor cell enrichment method avoids need for additional cell manipulations such as immunostaining because CTCs that are infected with the reporter virus express a detectable reporter gene product, such as, for example, a fluorescent protein (e.g. GFP or TurboFP635), a luminescent protein, an enzyme that produces a detectable product, or a protein that binds to a detectable substrate (e.g. a receptor). Additional exemplary detectable gene products are provided elsewhere herein.

[0267] In some examples, positive selection of tumor cells can be based on expression of a virally encoded protein. Infection of cells with a virus that encodes for a protein results in expression of the protein in the tumor cells. Cells that express the protein can be isolated. For example, if the virally encoded protein is a membrane protein, such as a receptor or transporter, cells that encode the protein can be isolated by immunocapture using an antibody specific for the protein.

[0268] Detection and/or enumeration of CTCs can be used, for example, for diagnosis of cancer, staging a cancer, determining the prognosis of a cancer, predicting the responsiveness of a subject to therapy with an oncolytic virus and/or monitoring effectiveness of an anti-cancer therapy, including therapy with an oncolytic virus alone or in combination with one or more additional anti-cancer agents. This can be effected by comparison to a control or reference sample or reference number of classifications of known levels of CTCs. For example, as described herein, it is found that oncolytic reporter viruses such as LIVP vaccinia viruses, preferentially infect metastasizing cells and cancer stem cells and decrease metastasis. Thus, detection of metastasis by detection of CTCs as provided herein, also can be used to stratify patients for treatment with an oncolytic virus to treat the metastasis.

[0269] In some examples, the oncolytic reporter viruses are employed to detect one or more CTCs in a fluid sample from a subject. Exemplary fluid samples are provided elsewhere herein and include, for example, blood, lymph, cerebrospinal fluid, pleural fluid, and peritoneal fluid. Typically, the sample contains one or more non-tumor cells in the sample. In some examples, such as a blood sample, the sample contains non-tumor cells including but not limited to red blood cells (RBCs, erythrocytes) and white blood cells, including leukocytes and platelets. In some examples, a CTC is detected among 1, 10, 100, 1×10³, 1×10⁴, 1×10⁵, 1×10⁶, 1×10⁷, ×10⁸, 1×10⁹, 1×10¹⁰, 1×10¹¹, 1×10¹², 1×10¹³, 1×10¹⁴, 1×10¹⁵, or more non-tumor cells.

[0270] In particular examples, the methods provided herein can detect 1, 2, 3, 4, 5, 6, 7, 8, 9, 10, 15, 20, 25, 30, 35, 40, 45, 50, 60, 70, 80, 90, 100, 200, 300, 400, 500, 600, 700, 800, 900, 1000, 1500, 2000 or more tumor cells in a body fluid sample, such as 1, 2, 3, 4, 5, 6, 7, 8, 9, 10, 15, 20, 25, 30, 35, 40, 45, 50, 60, 70, 80, 90, 100, 200, 300, 400, 500, 600, 700, 800, 900, 1000, 1500, 2000 or more tumor cells per 1 mL of a body fluid sample. In particular examples, the methods provided herein can detect 1, 2, 3, 4, 5, 6, 7, 8, 9, 10, 15, 20, 25, 30, 35, 40, 45, 50, 60, 70, 80, 90, 100, 200, 300, 400, 500, 600, 700, 800, 900, 1000, 1500, 2000 or more tumor cells in a blood sample, such as 1, 2, 3, 4, 5, 6, 7, 8, 9, 10, 15, 20, 25, 30, 35, 40, 45, 50, 60, 70, 80, 90, 100, 200, 300, 400, 500, 600, 700, 800, 900, 1000, 1500, 2000 or more tumor cells per 1 mL of a blood sample.

[0271] Cancer progression or effectiveness of cancer treatment can be determined using the methods provided herein. In particular examples, the level of CTCs is measured at a first time point using the methods provided and then compared to the level of CTCs measured at a second later time point by the same method. In some examples, the first time point is at a predetermined time prior to administration of a therapy, such as an anti-cancer therapy, and the second time point is at a predetermined time following administration of the therapy, during the administration of the therapy, or between successive administrations of the therapy. In exemplary methods, the sample can be obtained from the subject, for example, at least, at about or at 1 hour, 2 hours, 3 hours, 4 hours, 5 hours, 6 hours, 7 hours, 8 hours, 9 hours, 10 hours, 11 hours, 12 hours, 13 hours, 14 hours, 15 hours, 16 hours, 17 hours, 18 hours, 19 hours, 20 hours, 21 hours, 22 hours, 23 hours, 1 day, 2 days, 3 days, 4 days, 5 days, 6 days, 7 days, 8 days, 9 days, 10 days, 11 days, 12 days, 13 days, 14 days, 15 days, 16 days, 17 days, 18 days, 19 days, 20 days, 3 weeks, 4 weeks, 5 weeks, 6 weeks, 7 weeks, 8 weeks, 9 weeks, 10 weeks, 11 weeks, 12 weeks, 13 weeks, 14 weeks, 15 weeks, 16 weeks, 17 weeks, 18 weeks, 19 weeks, 20 weeks, or later following administration of the anti-cancer therapy to the subject. In some examples, samples are collected at a plurality of time points, such as at more than one time point, including, for example, at 1, 2, 3, 4, 5, 6, 7, 8, 9, 10, 15, 20 or more time points following administration of the anti-cancer therapy to the subject. In some examples, samples are collected at regular intervals following administration of the anti-cancer therapy to the subject.

[0272] In particular examples, the level of CTCs is measured at a first time point and then compared to the level of CTCs measured at a second later time point to determine cancer progression over time, where if the level of CTCs at the second time point is greater than the level of CTCs at the first time point, then the cancer has advanced in progression. In particular examples, if the level of CTCs at a second time point is 2, 3, 4, 5, 6, 7, 8, 8, 9, 10, 20, 30, 40, 50, 60, 70, 80, 90, 100, 200, 300, 400, 500, 600, 700, 800, 900, 1000 or more times greater than the level of CTCs at a first time point, then the cancer has advanced in progression.

[0273] In particular examples, the level of CTCs is measured at a first time and then compared to the level of CTCs measured at a second later time point to determine cancer regression over time, where if the level of CTCs at the second time point is less than the levels of CTCs at the first time point, then the cancer has regressed. In particular examples, if the level of CTCs at a first time point is 2, 3, 4, 5, 6, 7, 8, 8, 9, 10, 20, 30, 40, 50, 60, 70, 80, 90, 100, 200, 300, 400, 500, 600, 700, 800, 900, 1000 or more times greater than the level of CTCs at a second time point, then the cancer has regressed.

[0274] In particular examples, the level of CTCs is measured at a first time and then compared to the level of CTCs measured at a second later time point to determine stabilization of cancer over time, where if the level of CTCs at the second time point is equal to or about the same as the levels of CTCs at the first time point, then the cancer has stabilized.

[0275] In particular examples, the level of CTCs is measured at a first time point and then compared to the level of CTCs measured at a second later time point to determine the effectiveness of therapy in inhibiting cancer progression, where if the level of CTCs at the second time point is less than or equal to the levels of CTCs at the first time point, then the therapy is effective at inhibiting cancer progression. In particular examples, if the level of CTCs at a first time point is equal to or 2, 3, 4, 5, 6, 7, 8, 8, 9, 10, 20, 30, 40, 50, 60, 70, 80, 90, 100, 200, 300, 400, 500, 600, 700, 800, 900, 1000 or more times greater than the level of CTCs at a second time point, then the therapy is effective at inhibiting cancer progression.

[0276] In particular examples, the level of CTCs is measured at a first time point and then compared to the level of CTCs measured at a second later time point to determine the effectiveness of therapy in inhibiting cancer progression, where if the level of CTCs at the second time point is greater than the levels of CTCs at the first time point, then the therapy is not effective at inhibiting cancer progression. In particular examples, if the level of CTCs at a second time point is 2, 3, 4, 5, 6, 7, 8, 8, 9, 10, 20, 30, 40, 50, 60, 70, 80, 90, 100, 200, 300, 400, 500, 600, 700, 800, 900, 1000 or more times greater than the level of CTCs at a first time point, then the therapy is not effective at inhibiting cancer progression.

[0277] In some examples, the methods provided herein can detect at or about a 2-fold, 3-fold, 4-fold, 5-fold, 6-fold, 7-fold, 8-fold, 9-fold, 10-fold, 200-fold, 300-fold, 400-fold, 500-fold, 600-fold, 700-fold, 800-fold, 900-fold, 1000-fold or higher increase in the level of CTCs over time relative to a control sample. In particular examples, the methods provided herein can detect at or about a 2-fold, 3-fold, 4-fold, 5-fold, 6-fold, 7-fold, 8-fold, 9-fold, 10-fold, 200-fold, 300-fold, 400-fold, 500-fold, 600-fold, 700-fold, 800-fold, 900-fold, 1000-fold or higher decrease in the level of CTCs over time relative to a control sample. In some examples, the control sample is a sample obtained from a subject at a first time point and compared to a sample obtained from the subject at a second time point. In some examples, the control sample is a sample with a known amount of CTCs. In some examples, the control sample is a sample obtained from a subject with a particular cancer, a known stage of cancer, or a known cancer prognosis.

[0278] In some examples, a single body fluid sample is obtained from the subject at a particular time point. In some examples, a plurality of body fluid samples are obtained from the subject at a particular time. In some examples, body fluid samples of two or more different types are obtained, such as for example, a blood sample and a lymph sample. Exemplary types of fluid samples are provided herein.

[0279] In some examples, the oncolytic reporter virus is administered to a subject for the diagnosis and therapy. As is known in the art and described herein, oncolytic viruses, such as the LIVP vaccinia virus, can accumulate in tumors and metastases and are able to treat to the metastases without the expression of any additional gene products. Accordingly, the oncolytic reporter virus can be administered to a subject for detection of CTCs in vivo or ex vivo according to the methods provided herein and additionally treat the primary tumor, secondary metastases and/or CTCs.

[0280] Expression of one or more additional therapeutic gene products can enhance the therapy of the cancer. Accordingly, in some examples, the oncolytic reporter virus encodes one or more genes for therapy, such as a therapeutic gene for the treatment of cancer. Exemplary therapeutic gene products are provided elsewhere herein. In particular examples, the therapeutic gene encodes an anti-metastatic gene product.

[0281] 1. Exemplary Methods for Detection of CTCs with an Oncolytic Reporter Virus

[0282] a. Ex Vivo Detection of CTCs in Samples Treated with an Oncolytic Reporter Virus

[0283] In some examples, the method involves ex vivo detection and/or enumeration of CTCs in a sample obtained from a subject. For example, the method for detection and/or enumeration of CTCs in a sample involves contacting a sample from a subject with an oncolytic reporter virus and detecting infected cells by expression of a reporter protein. Because the oncolytic reporter viruses preferentially infect the tumor cells in the sample compared to non-tumor cells, detection of the expressed reporter gene product in infected cells thereby detects the CTCs in the sample. In some examples, the sample is obtained from a subject who has a cancer or metastasis or is suspected of having a cancer or metastasis.

[0284] In exemplary methods for ex vivo detection of tumor cells in a body fluid sample from a subject, the method involves the steps of: 1) providing a body fluid sample from a subject; 2) contacting the sample with an oncolytic reporter virus; and 3) detecting one or more cells infected by the oncolytic virus in the sample, thereby detecting one or more tumor cells. In some examples, the method includes the step of collecting the sample from the subject. In some examples, cells infected by the oncolytic reporter virus are detected by detecting expression of a reporter gene product encoded by the virus.

[0285] In some examples, the sample is infected with the oncolytic reporter virus immediately following collection of the sample from the subject. In other examples, the sample is infected with the oncolytic virus at about 1, 2, 4, 6, 12, 24, 48 or 72 hours or more after collection of the sample. In some examples, the cells in the sample are first concentrated by centrifugation, and then resuspended in an appropriate medium prior to infection with the virus.

[0286] In some examples, a method for ex vivo detection of CTCs in a sample from a subject involves performing a tumor cell enrichment method on the sample in combination with infection with an oncolytic reporter virus. Exemplary tumor cell enrichment methods are provided elsewhere herein, and include, for example, the passage of the sample through a microfilter or microfluidic device, immunomagnetic separation and/or removal of non-tumor cells from the sample. In some examples, the sample can be infected with the oncolytic reporter virus prior to performing of the tumor cell enrichment method. For example, the sample can be infected with the oncolytic reporter virus 1, 2, 3, 4, 5, 6, 7, 8, 9, 10, 11, 12, 13, 14, 15, 16, 17, 18, 19, 20, 21, 22, 23, 24 or more hours prior to performing of the tumor cell enrichment method. In other examples, the sample can be infected with the oncolytic reporter virus during performance of the tumor cell enrichment method. In other examples, the enriched sample can be infected with the oncolytic reporter virus following performance of the tumor cell enrichment method (i.e. the virus is used to infect the enriched sample). For example, the enriched sample can be infected with the oncolytic reporter virus 1, 2, 3, 4, 5, 6, 7, 8, 9, 10, 11, 12, 13, 14, 15, 16, 17, 18, 19, 20, 21, 22, 23, 24 or more hours after performing of the tumor cell enrichment method.

[0287] In some exemplary methods for ex vivo detection tumor cells in a sample from a subject, the method involves the steps of: 1) providing a body fluid sample from a subject; 2) performing a tumor cell enrichment method on the sample; 3) contacting the sample with an oncolytic reporter virus; and 4) detecting one or more cells infected by the oncolytic virus in the sample, thereby detecting one or more tumor cells. In some examples, step 2 is performed prior to step 3. In some examples, step 2 is performed following step 3. In some examples, steps 2 and 3 are performed simultaneously. In some examples, the method includes the step of collecting the sample from the subject. In some examples, cells infected by the oncolytic reporter virus are detected by detecting expression of a reporter gene product encoded by the virus.

[0288] For virus infection, the oncolytic reporter virus is added to the sample at a sufficient concentration, or multiplicity of infection (MOI) as to effect an appropriate level of infection that enables detection of CTCs by a particular method. The level of infection required can be determined by one of skill in the art. For example, if the level of expression of a reporter protein is to be assessed within hours of infection of the CTCs, then a sufficiently high level of infection can be achieved immediately to rapidly produce a detectable amount of the reporter protein. The type of reporter protein, the strength of the promoter, and the sensitivity of the detection methods also can influence the level of infection required. In some examples, the MOI is about 0.00001 to about 10, such as for example, about 0.0001 to about 1.0. Exemplary MOI include, for example, at or about 0.00001, 0.0001, 0.001, 0.01, 0.1, 1.0, 10 or more.

[0289] Determination of a multiplicity of infection to use in the assay for a particular reporter virus can be determined using well-known methods to assess infectivity, such as by a plaque-forming unit (pfu) assay. For an assay to measure the level of CTCs in a sample, typically a multiplicity of infection is selected to ensure all CTCs are infected while non-CTCs are not infected. The precise conditions for infection of cells with an oncolytic reporter virus are selected according to the sample, the particular reporter virus and the detection method. Such conditions can be readily determined and modified by one of skill in the art. Exemplary conditions for infection of samples are provided in the Examples provided herein. In non-limiting examples, 10 pfu, 100 pfu, 1×10³ pfu, 1×10⁴ pfu, 1×10⁵ pfu, 1×10⁶ pfu, 1×10⁷ pfu, 1×10⁸ pfu, 1×10⁹ pfu, 1×10 pfu or more of an oncolytic reporter virus, such as a vaccinia virus, is used to infect 1 mL of a fluid sample, such as a blood sample, from a subject.

[0290] Detection of the expressed reporter gene product in the infected CTCs can be performed at a predetermined time following infection or at multiple time points following infection. A detectable level of reporter protein can accumulate in, for example, 2 hours or more, 4 hours or more, 6 hours or more, 8 hours or more, 12 hours or more, 24 hours or more, or 48 hours or more following viral infection. The type of reporter protein and the sensitivity of the detection methods can influence the incubation time required. Determination of the optimal time for detection of the expressed reporter gene is well within the capabilities of one of skill in the art and can be determined empirically in a sample that contains a known level of CTCs.

[0291] Exemplary methods of detecting expressed reporter gene products are provided elsewhere herein and include, but are not limited to fluorescent, luminescent, spectrophotometric, chromogenic assays, or radioactive detection methods.

[0292] b. Ex Vivo Detection of CTCs in Samples from Subjects Treated with an Oncolytic Reporter Virus

[0293] In some examples, the method for detection and/or enumeration of CTCs in a sample involves detecting a reporter gene expressed in a sample from a subject to whom a oncolytic reporter virus was administered. As described herein, tumor cells, in particular, metastasizing cells and cells exhibiting stem cell like properties, are preferentially infected by oncolytic viruses, such as vaccinia virus, in vivo following administration to a subject with a metastasizing tumor. The CTCs that are shed from the tumors also are infected with the oncolytic virus, thus permitting their detection in fluid samples from the subject. In some examples, the sample is obtained from a subject who has a cancer or metastasis or is suspected of having a cancer or metastasis.

[0294] In some exemplary methods for ex vivo detection tumor cells in a body fluid sample from a subject, the method involves the steps of: 1) providing a sample from a subject that has been administered an oncolytic reporter virus; and 2) detecting one or more cells infected by the oncolytic virus in the sample, thereby detecting one or more tumor cells. In some examples, the method includes the step of collecting the sample from the subject. In some examples, cells infected by the oncolytic reporter virus are detected by detecting expression of a reporter gene product encoded by the virus.

[0295] In some examples, the method includes a step of administering an oncolytic virus encoding a reporter gene to a subject that has cancer or is suspected of having cancer for the detection of CTCs. For example, in some exemplary methods for ex vivo detection tumor cells in a body fluid sample from a subject, the method involves the steps of: 1) administering an oncolytic reporter virus to a subject; 2) obtaining a body fluid sample from the subject; and 3) detecting one or more cells infected by the oncolytic virus in the sample, thereby detecting one or more tumor cells. In some examples, cells infected by the oncolytic reporter virus are detected by detecting expression of a reporter gene product encoded by the virus.

[0296] The oncolytic viruses encoding a reporter gene can be administered to the subject by any suitable method for administering a diagnostic or therapeutic oncolytic virus. Administration of oncolytic viruses to a subject, including a human subject or non-human mammalian subject, is well-known in the art. The oncolytic reporter virus can be administered by any suitable route. For example, the oncolytic viruses encoding a reporter gene can be administered to the subject systemically or locally to the tumor. Exemplary routes of administration include, but are not limited to intravenous, intraarterial, intratumoral, endoscopic, intralesional, intramuscular, intradermal, intraperitoneal, intravesicular, intraarticular, intrapleural, percutaneous, subcutaneous, oral, parenteral, intranasal, intratracheal, inhalation, intracranial, intraprostatic, intravitreal, topical, ocular, vaginal, or rectal routes of administration. In particular examples, the oncolytic viruses encoding a reporter gene are administered intraperitoneally or intravenously.

[0297] The dosage regimen can be any of a variety of methods and amounts, and can be determined by one skilled in the art according to known clinical factors. As is known in the medical arts, dosages for any one subject can depend on many factors, including the subject's species, size, body surface area, age, sex, immunocompetence, and general health, the particular virus to be administered, duration and route of administration, the kind and stage of the disease, for example, tumor size, and other treatments or compounds, such as chemotherapeutic drugs, being administered concurrently. In addition to the above factors, such levels can be affected by the infectivity of the virus, and the nature of the virus, as can be determined by one skilled in the art. In the present methods, appropriate minimum dosage levels of viruses can be levels sufficient for the virus to survive, grow and replicate in a tumor or metastasis. Exemplary minimum levels for administering a virus to a 65 kg human can include at least or about 1×10⁵ plaque forming units (PFU), at least about 5×10⁵ PFU, at least about 1×10⁶ PFU, at least about 5×10⁶ PFU, at least about 1×10⁷ PFU, at least about 1×10⁸ PFU, at least about 1×10⁹ PFU, or at least about 1×10¹⁰ PFU. In the present methods, appropriate maximum dosage levels of viruses can be levels that are not toxic to the host, levels that do not cause splenomegaly of 3 times or more, levels that do not result in colonies or plaques in normal tissues or organs after about 1 day or after about 3 days or after about 7 days. Exemplary maximum levels for administering a virus to a 65 kg human can include no more than about 1×10¹¹ PFU, no more than about 5×10¹⁰ PFU, no more than about 1×10¹⁰ PFU, no more than about 5×10⁹ PFU, no more than about 1×10⁹ PFU, or no more than about 1×10⁸ PFU.

[0298] Typically, the body fluid sample is obtained at a predetermined time following administration of the virus. In some examples, the predetermined time is sufficient for the virus to infect a tumor cell in the subject. In some example the predetermined time is sufficient for the free virus to be cleared from the subject. As one skilled in the art will recognize, the time period for oncolytic virus infection of the tumor and appearance of infected CTCs in a fluid sample from the subject will vary. For example, the time period for infection of a virus will vary depending on factors, such as the infectivity of the virus, the route of administration, the immunocompetence of the host and dosage of the virus. Such times can be empirically determined if necessary.

[0299] Generally, expression of reporter protein in CTCs infected with an oncolytic reporter virus can be determined at time points from about less than 1 day, about or 1 day to about 2, 3, 4, 5, 6 or 7 days, about or 1 week to about 2, 3 or 4 weeks, about or 1 month to about 2, 3, 4, 5, 6 months or longer after administration of the virus. In exemplary methods, the sample can be obtained from the subject, for example, at least, at about or at 6 hours, 7 hours, 8 hours, 9 hours, 10 hours, 11 hours, 12 hours, 13 hours, 14 hours, 15 hours, 16 hours, 17 hours, 18 hours, 19 hours, 20 hours, 21 hours, 22 hours, 23 hours, 1 day, 2 days, 3 days, 4 days, 5 days, 6 days, 7 days, 8 days, 9 days, 10 days, 11 days, 12 days, 13 days, 14 days, 15 days, 16 days, 17 days, 18 days, 19 days, 20 days, 3 weeks, 4 weeks, 5 weeks, 6 weeks, 7 weeks, 8 weeks, 9 weeks, 10 weeks, 11 weeks, 12 weeks, 13 weeks, 14 weeks, 15 weeks, 16 weeks, 17 weeks, 18 weeks, 19 weeks, 20 weeks, or later following administration of the oncolytic reporter virus to the subject. In some examples, samples are collected from the subject at multiple time points, such as at more than one time point, including, for example, at 2, 3, 4, 5, 6, 7, 8, 9, 10, 15, 20 or more time points.

[0300] As shown in the examples provided, oncolytic reporter viruses, such as the oncolytic reporter vaccinia viruses, are therapeutic and are able to treat metastases and CTCs in the subject. This leads to a decrease in the number of tumor cells that are metastasizing and are shed from the tumor. Thus, for use in initial detection of metastasis in a subject, a body fluid sample generally is obtained from the subject within a time period prior to significant reduction of metastasis due to oncolytic activity of the virus. In exemplary methods for the initial detection of the metastasis using an oncolytic reporter virus, a body fluid sample typically is obtained a predetermined time within a few weeks following administration of the virus. In particular examples, the body fluid sample is obtained from the subject 6 hours, 12 hours, 18 hours, I day, 2 days, 3 days, 4 days, 5 days, 6 days, 7 days, 8 days, 9 days, 10 days, 11 days, 12 days, 13 days, or 14 days following administration of the virus to the subject.

[0301] In some examples, a method for ex vivo detection of CTCs in a sample from a subject involves performing a tumor cell enrichment method on the sample. For example, in some exemplary methods for ex vivo detection tumor cells in a sample from a subject, the method involves the steps of: 1) providing a body fluid sample from a subject that that has been administered an oncolytic reporter virus; 2) performing a tumor cell enrichment method on the sample; and 3) detecting one or more cells infected by the oncolytic virus in the sample, thereby detecting one or more tumor cells. In some examples, cells infected by the oncolytic reporter virus are detected by detecting expression of a reporter gene product encoded by the virus. In some examples, the method includes the step of collecting the body fluid sample from the subject.

[0302] In some examples, the method includes a step of administering an oncolytic virus encoding a reporter gene to a subject for the detection of tumor cells and also involves performing a tumor cell enrichment method on the sample. In some exemplary methods for ex vivo detection tumor cells in a sample from a subject, the method involves the steps of: 1) administering an oncolytic reporter virus to a subject; 2) obtaining a body fluid sample from the subject; and 3) detecting one or more cells infected by the oncolytic virus in the sample, thereby detecting one or more tumor cells. In some examples, cells infected by the oncolytic reporter virus are detected by detecting expression of a reporter gene product encoded by the virus. In some examples, the method also involves performing a tumor cell enrichment method on the sample.

[0303] Exemplary methods of detecting expressed reporter proteins are provided elsewhere herein and include, but are not limited to fluorescent, luminescent, spectrophotometric, chromogenic assays, or radioactive detection methods.

[0304] c. In Vivo Detection of CTCs in Subjects Treated with an Oncolytic Reporter Virus

[0305] In exemplary methods, real time detection and quantification of CTCs can be performed in vivo as the CTCs circulate through a live subject. Such methods can be performed without extraction of a body fluid sample from the subject. For example, CTCs expressing a detectable protein can be detected as the cells pass through peripheral blood vessels close to the surface of the skin (e.g., intravital flow cytometry; see, e.g., He et al. (2007) Proc. Natl. Acad. Sci. USA 104(28):11760-11765). In some examples, CTCs expressing a fluorescent protein can be irradiated to excite the expressed fluorescent protein, and the labeled cells can be quantified by detecting the fluorescent radiation emitted by the excited cells by an in vivo flow cytometry method. In some examples, the cells are detected as they circulate pass near an external detector. In some examples, an implantable device is employed for detection. Examples of such methods for in vivo detection of circulating cells, including labeled cancer cells, are described in, for example, in Georgakoudi et al. (2004) Cancer Research 64: 5044, Boutrus et al. (2007) J. Biomed. Opt. 12(2): 020507, Gal et al. (2005) Arthritis and Rheumatism 52: 3269, Novak et al. (2004) Optics Letters 29(1): 77, and Wie et al. (2005) Mol Imaging 4(4): 415-416.

[0306] As described herein, oncolytic reporter viruses administered to a tumor bearing subject result in CTCs that are infected with the oncolytic reporter virus. Such cells can be detected in vivo using an in vivo flow cytometry method which detects expression of the reporter protein by the infected CTCs.

[0307] Accordingly, a subject having cancer or metastasis or is suspected of having a cancer or metastasis can be administered an oncolytic reporter virus, such as a vaccinia virus, encoding a detectable protein, such as a fluorescent protein, and detected in vivo using an in vivo detection method such as an in vivo flow cytometry method. In an exemplary method for in vivo detection of circulating tumor cells in a subject, the method involves the steps of: 1) administering an oncolytic reporter virus to a subject; and 2) detecting one or more cells infected by the oncolytic virus in vivo, thereby detecting one or more tumor cells. In some examples, cells infected by the oncolytic reporter virus are detected by detecting expression of a reporter gene product encoded by the virus.

[0308] In some examples, where the reporter protein is a receptor, a detectable ligand, such as a fluorescent or radiolabeled ligand, that binds to the receptor can be administered to the subject for detection of the CTCs in vivo. In other examples, where the reporter protein is an enzyme, a detectable substrate can be administered to the subject for detection of the CTCs in vivo.

[0309] Exemplary methods of detecting expressed reporter proteins are provided elsewhere herein and include, but are not limited to fluorescent, luminescent, spectrophotometric, chromogenic assays, or radioactive detection methods.

[0310] 2. Methods for Enrichment of CTCs for Use in Combination with an Oncolytic Reporter Virus

[0311] Among the methods provided herein are methods of detecting one or more CTCs in a sample where the method involves performing one or more tumor cell enrichment methods in combination with detection of CTCs using an oncolytic virus. Any method that increases the amount of tumor cells in a sample relative to non-tumor cells or other non-cellular components in the sample can be employed to enrich the CTCs and can be used in combination with an oncolytic reporter virus for detection of CTCs. Such methods include, but are not limited to, positive selection of tumor cells based on one or more properties of a tumor cell or negative selection where non-tumor cells, such as, for example, blood cells, are removed from the sample. As described herein, use of an oncolytic virus in combination with a tumor cell enrichment method improves detection and enumeration of CTCs in a sample by providing a simple, easy and highly sensitive and specific method of identifying CTCs in the enriched sample without additional processing steps. Detection of CTCs with oncolytic reporter viruses does not require multistep staining procedures and reagents that are typically required for immunostaining procedures.

[0312] Tumor cell enrichment methods for use in combination with an oncolytic virus can be selected based on the specificity and/or sensitivity of the method. For example, a tumor cell enrichment method can be selected based on the ability of the method to decrease the amount of tumor cells in the sample with minimal or no loss of CTCs in the sample. In some examples, the tumor cell enrichment method results in the removal of at least about 10%, 20%, 30%, 40%, 50%, 60%, 70%, 80%, 90%, 95%, 96%, 97%, 98%, 99% of non-tumor cells from the sample. In some examples, the tumor cell enrichment method results in retention of at least about 50%, 60%, 70%, 80%, 90%, 95%, 96%, 97%, 98%, 99% of CTCs in the sample.

[0313] In some examples, the tumor cell enrichment method for use in combination with an oncolytic reporter virus involves selection of CTCs based on physical properties of CTCs. Exemplary physical properties include, for example, size, density, stiffness, deformability, and electrical charge compared to a non-tumor cell. In some examples, the tumor cell enrichment method for use in combination with an oncolytic reporter virus involves selection of CTCs based on biological properties of CTCs. Exemplary biological properties include, for example, expression of a cell surface marker or cell invasiveness. In some examples the tumor cell enrichment method for use in combination with an oncolytic reporter virus involves selection of CTCs based on a combination of one or more physical and/or one or more biological properties of a CTC. In particular examples, the tumor cell enrichment method uses a microfilter or a microfluidic device for the capture or retention of CTCs.

[0314] In some examples, the tumor cell enrichment method for use in combination with an oncolytic reporter virus involves positive and/or negative selection of CTCs in a sample based on the expression of one or more cell surface markers. For example, cell surface markers can be employed to select CTCs in a sample (i.e. positive selection) or to remove non-CTCs from a sample (i.e. negative selection). Exemplary markers for positive selection of CTCs include epithelial specific markers, markers of epithelial mesenchymal transition (EMT), cancer cell markers and cancer stem cell markers. Exemplary epithelial specific markers include, but are not limited to, EpCAM and cytokeratin (CK). Exemplary markers for negative selection of CTCs includes, but is not limited to, CD45 for selection of leukocytes.

[0315] Exemplary methods for tumor cell enrichment include, but are not limited to, microfiltration, microfluidic chip capture, immunomagnetic separation, density gradient separation, acoustophoresis, dielectrophoresis and selective lysis of particular cell types, for example, red blood cells in a blood sample (see also, Pantel and Alix-Panabieres (2010) Trends Mol Med 16(9):398-406).

[0316] a. Microfiltration

[0317] In some examples, the tumor enrichment method for use in combination with an oncolytic reporter virus involves capture of tumor cells by size segregation on a microfilter. For example, a microfilter that allows the passage of non-tumor cells but not tumor cells based on the larger size of the tumor cells can be employed to enrich CTCs in a sample. The CTCs in the enriched sample can be detected by infection with the oncolytic reporter virus and detection of the expressed reporter gene product encoded by the virus.

[0318] In exemplary methods, CTCs are enriched in a body fluid sample by applying the fluid sample to a microfilter. The enriched sample is then infected with the oncolytic reporter virus, and expression of the reporter gene is detected, thereby detecting the CTCs in the enriched sample.

[0319] Use of an oncolytic reporter virus for detection of CTCs allows CTCs to be detected on the microfilter without additional staining procedures. In some examples, infection of the captured CTCs is performed directly on the microfilter. For example, infection with the oncolytic reporter virus can be performed by adding the virus to the captured cells that have not passed through the microfilter. Exemplary methods for infecting cells on a microfilter are provided herein. In some examples, the microfilter is incubated in a suitable medium containing the virus for infection. In some examples, the infected CTCs are detected directly on the microfilter. In some example, the infected CTCs are removed from the microfilter and then detected.

[0320] In some examples, infection of the captured CTCs is performed after recovery of the captured cells from the microfilter. For example, the captured cells that have not passed through the microfilter can be gently removed from the microfilter using an suitable buffer to remove the cells from the surface of the filter and then contacted with the oncolytic reporter virus in a suitable medium for infection.

[0321] In some examples, the sample is first infected with oncolytic reporter virus and then the infected sample is passed through the microfilter. The cells that have not passed through the filter then can be detected directly on the filter.

[0322] In other exemplary methods, a microfilter is employed to enrich CTCs in a sample from a subject previously administered an oncolytic reporter virus. In such methods, the sample from the subject is passed through the microfilter and then expression of the reporter gene is detected, thereby detecting the captured CTCs in the enriched sample.

[0323] Microfilters for the enrichment of CTCs in a sample are available in the art for use in combination with an oncolytic reporter virus for detection. Exemplary microfilters include, but are not limited to, parylene slot filters (see e.g., Xu et al. (2010) Cancer Res 70(16):6420-6426 and U.S. Pat. Pub. No. 2011/0053152), track-etched filters (e.g. Nucleopore track-etched polycarbonate membrane filter (Whatman)), and CellSieve™ micropore filters (Creatv MicroTech). In some examples, the microfilter employed is part of an extracorporeal filtration device for the removal of CTCs from the subject's blood stream (see, e.g. US Pat. Pub. No. 2011/024443). In such examples, blood is directed from the subject through the filtration device, where CTCs are retained by the microfilter, and the filtered blood is administered back into the subject.

[0324] In some examples, the microfilter contains a plurality of pores. The pores can be any suitable geometric shape, provided the pores prevent passage of CTCs through the microfilter. For example, the pores can be circular, elliptical, oval, rectangular, square, symmetrical polygonal, unsymmetrical polygonal, or irregular shaped, or can comprise a combination of pores of different shapes. In some examples, the pores are arranged in an array on the microfilter. In some examples, the pores are spaced at regular intervals from each other (i.e. equidistant). In some examples, the pores are irregularly spaced. In some examples, the pores are arrayed in rows. In some examples, the pores in consecutive rows are offset from one another.

[0325] In some examples, where the microfilter contains circular pores, the pores are uniform in diameter. In some examples, where the microfilter contains circular pores, the pores are not uniform in diameter. In some examples, where the microfilter contains circular pores, the diameter of the pores is about 6 μm, 6.5 μm, 7 μm, 7.5 μm, 8 μm, 8.5 μm, 9 μm or 9.5 μm in diameter. Typically, the diameter of the pores is about 8 μm.

[0326] In particular examples, the filter contains rectangular slots. In some examples, the rectangular slots comprise a shape generally having a length and width where the length is longer than the width. In some examples the width of the rectangular slots is less than about 9.5 μm, 9 μm, 8.5 μm, 8 μm, 7.5 μm, 7 μm, 6.5 μm, or 5 μm. In some examples, the ratio of length to width of the rectangular slot is about 2:1, 3:1, 4:1, 5:1, 6:1, 7:1, 8:1, 9:1, 10:1 or greater. In particular examples, the rectangular slot size of the microfilter is about 6 μm in width and about 40 μm in length.

[0327] In some examples, the thickness of the microfilter membrane is at least about 0.1 μm, 0.5 μm, 1 μm, 1.5 μm, 2 μm, 2.5 μm, 3 μm, 3.5 μm, 4 μm, 4.5 μm, 5 μm, 6 μm, 7 μm, 8 μm, 9 μm, 10 μm, 11 μm, 12 μm, 13 μm, 14 μm, 15 μm, 16 μm, 17 μm, 18 μm, 19 μm, 20 μm or thicker. In particular examples, the thickness of the microfilter membrane is about 10 μm. In some examples, the thickness of the microfilter is about 1%, 2%, 3%, 4%, 5%, 6%, 7%, 8%, 9%, 10%, 15%, 20%, 25%, 30% or greater than the width or diameter of the pore. In particular examples, the thickness of the microfilter is between about 5% to about 25% the width or diameter of the pore.

[0328] In some examples, the microfilter has a pore density of from about 1 to 40,000, 1,000 to 40,000, 5,000 to 40,000; 6,000 to 40,000, 7000 to 40,000, 10,000 to 40,000; 10,000 to 30,000; 20,000 to 30,000; 20,000 to 40,000; or 30,000 to 40,000 pores per square millimeter. In some examples, the microfilter has a pore density at least about 1, 10, 100, 200, 300, 400, 500, 600, 700, 800, 900, 1000, 2000, 3000, 4000, 5000, 6000, 7000, 8000, 9000, 10,000, 15,000, 20,000, 25,000, 30,000, 35,000, 40,000 or more pores per square millimeter.

[0329] In some examples, a constant pressure can be applied to the sample to facilitate the filtration process, such as a constant low-pressure is applied to the sample. In some examples, the pressure can range from about 0.01 to about 0.5 psi, such as, for example, from 0.05 to 0.4 psi, such as, for example, 0.1 to 0.3 psi or from 0.1 to 0.25 psi.

[0330] In some examples, the microfilter contains a single porous membrane. In some examples, the microfilter contains two or more porous membranes (see, e.g. Pat. Pub. No. 2009/0188864) arranged in layers. In some examples, where the microfilter contains two or more porous membranes, adjacent membranes are typically arranged such that the pores of one membrane are horizontally offset from the pores of an adjacent membrane. In such examples, two adjacent membranes typically are separated by a gap that is smaller than the diameter of a CTC (e.g. less than about 8 μm). In some examples, where the microfilter contains two or more porous membranes, the pores of adjacent membranes can be the same size or a different size. In a particular example, the microfilter contains a first top membrane having an array of pores ˜9 μm in diameter and a bottom membrane having an array of pores ˜8 μm in diameter, where the top membrane and the bottom membrane are separated by a gap ˜6.5 μm in width.

[0331] In particular examples, the sample is passed through the filter using a constant low pressure delivery system. In some examples, the sample is passed through the microfilter at a rate of about 0.01 ml/min, 0.05 ml/min, 0.1 ml/min, 0.5 ml/min, 1 ml/min, 2 ml/min, 3 ml/min, 4 ml/min, 5 ml/min, 6 ml/min, 7 ml/min, 8 ml/min, 9 ml/min, 10 ml/min, 11 ml/min, 12 ml/min, 13 ml/min, 14 ml/min, 15 ml/min or faster. In some examples, a vaccuum manifold is employed to draw the sample through the filter.

[0332] In some examples, the microfilter is a parylene microfilter. In some examples, the microfilter is a parylene-C slot microfilter (see e.g., Xu et al. (2010) Cancer Res 70(16):6420-6426 and U.S. Pat. Pub. No. 2011/0053152).

[0333] b. Microfluidic Devices

[0334] In some examples, the tumor cell enrichment method for use in combination with an oncolytic reporter virus involves capture of tumor cells using a microfluidic device. A variety of microfluidic devices are available in the art for the selection of CTCs in a fluid sample. Such microfluidic devices include for example, microfluidic devices that select tumor cells based on physical properties such as, for example, size, stiffness, and deformability, or based on biological properties such as, for example, the expression of a cell surface marker. Use of an oncolytic reporter virus for detection of CTCs allows CTCs to be detected on the microfluidic device without additional staining procedures since the infected CTCs can be detected by expression of a reporter gene product encoded by the virus.

[0335] In some examples, passage of a sample through the microfluidic device captures CTCs based on physical properties of the CTC but other non-tumor cells pass through the device and are not captured. In exemplary methods, the microfluidic device contains a microfluidic channel having a plurality of obstacles for the capture of CTCs where the obstacles are arranged to trap CTCs based on physical properties of the CTCs. An exemplary microfluidic device that captures CTCs based on physical properties of the CTC includes, but is not limited to the CTC Microfiltration Biochip (ClearCell™ System and CTChip®, Clearbridge Biomedics Pte Ltd., Singapore; see e.g. Tan et al. (2009) Biomedical Microdevices 11(4): 883-892 and Tan et al. (2010) Biosens Bioelectron 26:1701-1705; see, also International PCT application No. WO 2011/109762).

[0336] In exemplary methods, microfluid device contains a plurality of cell traps. Exemplary cell traps contain gaps of a sufficient size to allow for passage of non-tumor cells, but retain tumor cells. For example, cell traps can contain 1, 2, 3, 4 or more gaps. In some examples, the gaps are about 4 μm to about 5 μm. In some example, the cell traps from a crescent shape, such as, for example, “U” shape, “V” shape or “C” shaped structure. The cell traps can be arranged in the microfluidic device as a plurality of rows, sufficiently spaced apart to minimize clogging of the device, such as, for example about 10 μm to about 100 μm, such, for example about 10 μm, 20 μm, 30 μm, 40 μm, 50 μm, 60 μm, 70 μm, 80 μm, 90 μm or 100 μm. The cell traps in a particular row can be offset from the cell traps in a successive row, such as, for example, about 20 μm to about 50 μm. In some examples, the rows contain alternating left and right titled orientations of the crescent shaped cell traps in successive row of the cell traps.

[0337] In some examples, passage of a sample through the microfluidic device captures CTCs based on expression of one or more CTC-specific cell surface proteins on the CTC but other non-tumor cells that do not express the protein pass through the device and are not captured. In some exemplary methods, the microfluidic device contains a microfluidic channel having a plurality of obstacles (e.g. micropost) for the capture of CTCs (i.e. cell capture surface) where the obstacles are bound to a tumor specific binding agent. In other exemplary methods, the microfluidic device contains a plurality of microfluidic channels having a plurality of surfaces bound to a tumor specific binding agent. In some examples, the plurality of surfaces from one or more ridges. In some examples, the one or more ridges are arranged sequentially to form a herringbone shape.

[0338] In some examples, a single tumor specific binding agent is employed. In some examples, two or more binding agents are employed. Exemplary tumor specific binding agents include but are not limited to an antibody, antibody fragment, a receptor or a peptide. Exemplary tumor specific binding agents include but are not limited to anti-epithelial cell adhesion molecule (EpCAM) or anti-cytokeratin antibodies or antigen binding fragments thereof. In some examples, the tumor specific binding agent is an RGD peptide.

[0339] In some examples, the microfluidic device also contains a cell rolling-inducing agent is immobilized to a cell capture surface of the microfluidic device (see, e.g. International PCT Publication No. WO 2010/124227). A cell rolling-inducing agent can aid in the capture of the CTCs by the tumor specific binding agent. In some examples, the cell rolling-inducing agent is a selectin, such as, for example E-selectin, P-selectin or L-selectin.

[0340] In some examples, the tumor specific binding agent and/or cell rolling-inducing agent is immobilized to the cell capture surface (e.g. micropost or other surface of the microfluidic device) by the attachment of the tumor specific binding agent directly to the cell capture surface. In some examples, the tumor specific binding agent and/or cell rolling-inducing agent is covalently attached to the cell capture surface through a chemical moiety, including, but not limited to, an epoxy group, a carboxyl group, a thiol group, an alkyne group, an azide group, a maleimide group, a hydroxyl group, an amine group, an aldehyde group, and combinations thereof. In some examples, the tumor specific binding agent and/or cell rolling-inducing agent is immobilized to the cell capture surface using a peptide or chemical linker. Exemplary linkers include, but are not limited to, dextran, a dendrimer, polyethylene glycol, poly(L-lysine), poly(L-glutamic acid), polyvinyl alcohol, polyethyleneimine, poly(lactic acid), poly(glycolic acid) and combinations thereof.

[0341] An exemplary microfluidic device that captures CTCs based on expression of one or more CTC-specific cell surface proteins is the CTC-chip, which contains anti-EpCAM antibodies coupled to microposts (see, e.g. Nagrath et al. (2007) Nature 450:1235-1239). Another exemplary microfluidic device that contains a plurality of microfluidic channels having a plurality of surfaces bound to a tumor specific binding agent that binds to a CTC includes, but is not limited to the Herringbone CTC Chip (see, e.g. Stott et al. (2010) Proc. Natl. Acad. Sci. U.S.A. 107(43):18392-19397; see also International PCT Publication No. WO 2010/124227).

[0342] In exemplary methods, CTCs are enriched in a sample by applying the sample to a microfluidic device. The enriched sample (i.e. the cell population that is retained by the microfluidic device which is enriched for tumor cells) is then infected with the oncolytic reporter virus and expression of the reporter gene product is detected, thereby detecting the tumor cells in the enriched sample. In some examples, infection with the oncolytic reporter virus is performed by adding the virus to the captured cells on the microfluidic device. In some examples, the captured cells are removed from the microfluidic device and then contacted with the oncolytic reporter virus.

[0343] In exemplary methods, the microfluidic device has a channel volume of 10 μl-20 ml, for example 100 μl-15 ml, 100 μl-10 ml, 100 μl-5 ml, 100 μl-1 ml, or 100 μl-0.5 ml. In some examples, the channel of the microfluidic device can be connected to a reservoir that holds the fluid sample prior to capture and feeds the fluid sample into the microfluidic channel. The reservoir can have a volume, for example, of about 10 μl, 25 μl, 50 μl, 100 μl, 250 μl, 500 μl, 1 ml, 2.5 ml, 5 ml, 10 ml, 25 ml, 50 mL or more. The microfluidic devices can be combined with pumps for the delivery of samples to the device, delivery of the oncolytic report virus for infection of the retained cell and/or wash buffers or other labeling reagents.

[0344] In other exemplary methods, CTCs are enriched in a sample from a subject to whom an oncolytic reporter virus is administered. Enrichment can be effected by applying the sample to a microfluidic device that captures CTCs, and then detecting the expression of the reporter gene product, thereby detecting the CTCs in the enriched sample. In some examples, the infected CTCs are detected on the microfluidic device. In some examples, the infected CTCs are removed from the microfluidic device and then detected.

[0345] c. Immunomagnetic Separation

[0346] In some examples, the tumor enrichment method for use in combination with an oncolytic reporter virus involves immunomagnetic separation based on positive selection of CTCs or negative selection and removal of non-CTCs from the sample (i.e. immunodepletion). Such methods employ magnetic beads coupled to antibodies. In examples where positive selection is employed, the magnetic beads can be coupled to an antibody specific for a protein specifically expressed by the CTCs.

[0347] Exemplary methods for selection of CTCs based on immunomagnetic separation include but are not limited to purification based on expression of EpCam and/or cytokeratin. Such methods are known in the art and include, for example, the CellSearch® platform (Veridex, Warren, N.J., USA; see e.g. Pantel et al. (2009) Nat. Rev. Clin Oncol. 6:339-351), CTC-chip Ephesia method (see, e.g. Saliba et al. (2010) Proc. Natl. Acad. Sci. USA 107:14524-14529), MagSweeper system (see, e.g. Talasaz et al. (2009) Proc. Natl. Acad. Sci. USA 106:3970-3975), and Ariol® system (see, e.g. Deng et al. (2008) Breast Cancer Res 10:R69.).

[0348] In examples where positive selection is employed, the magnetic beads can be coupled to an antibody specific for a protein expressed by one or more non-tumor cell types in the sample. For example, lymphocytes can be removed from a sample by immunodepletion of CD45 positive cells by immunomagnetic separation using magnetic beads coupled to anti-CD45 antibodies.

[0349] In some examples, magnetic beads can be coupled to an antibody specific for a virally encoded protein, including any antibody described herein, that is expressed on the surface of a tumor cell, particularly a CTC. For example, the protein can be a membrane protein expressed on the surface of CTC. Examples of virally encoded proteins include any described herein, such as, for example, cell surface receptor, including transporter proteins. In some examples, the virally encoded protein is NIS or NET, and the magnetic beads are coupled to an antibody specific for an epitope on the extracellular domain of NIS that permits capture of such cells.

[0350] d. Acoustophoresis

[0351] In some examples, the tumor enrichment method for use in combination with an oncolytic reporter virus involves selection of CTCs in a sample based on the differential response of CTCs to sound waves due to their larger size (see, e.g., Augustsson et al. (2010) 14th International Conference on Miniaturized Systems for Chemistry and Life Sciences, 3-7 Oct. 2010, Groningen, The Netherlands 1592-1594; Lenshof and Laurell (2011) J Lab Autom. 16(6):443-449 and Wiklund and Onfelt (2012) Methods Mol. Biol. 853:177-196). For example, fluid samples, such as a blood fluid sample, can be processed through a microfluidic chamber, where an acoustic force is applied to stream of cells flowing through the chamber creating an ultrasonic standing wave field. Cells are separated in to bifurcating channels based on deflection of the cells through the acoustic field. Tumor cells are able to be separated from normal blood based on their differential deflection through the wave field. The CTCs in the enriched sample can be detected by infection with the oncolytic reporter virus and detection of the expressed reporter gene product encoded by the virus.

[0352] e. Dielectrophoresis

[0353] In some examples, the tumor enrichment method for use in combination with an oncolytic reporter virus involves selection of CTCs in a sample based on the dielectric properties of CTCs. Dielectric properties (polarisability) of cells are dependant upon factors, such as cell diameter, membrane area, density, conductivity and volume. Exemplary methods for enrichment of CTCs in a sample include, but are not limited to, dielectrophoretic field-flow fractionation (depFFF) (e.g., ApoStream™ (ApoCell); see, e.g. Gascoyne P R et al. (2009) Electrophoresis 30:1388-1398 and Wang et al. (2000) Anal Chem. 72(4):832-839). For example, fluid samples, such blood fluid sample, can be processed through a microfluidic chamber containing an electrode array that attracts or repels cells depending on their dielectric properties. In a blood sample, for example, tumor cells are pull towards the electrode array, while blood cells are repelled. This results in retardation of the flow of tumor cells through the chamber, while the blood cell flow more quickly. Thus, normal blood cells are separated from the slower moving tumor cells allowing for enrichment of a tumor cell fraction. The CTCs in the enriched sample can be detected by infection with the oncolytic reporter virus and detection of the expressed reporter gene product encoded by the virus.

[0354] f. Density Gradient Separation

[0355] In some examples, the tumor enrichment method for use in combination with an oncolytic reporter virus involves selection of CTCs in a sample based on the cellular density of the CTCs relative to other cells in a sample using a cell separation medium. Mononuclear cells (e.g. monocytes and lymphocytes) and CTCs have a buoyant density of <1.077 g/mL and can be separated from other cells, such as red blood cells (erythrocytes) and polymorphonuclear (PMN) leukocytes (granulocytes), which have a density of >1.077 g/ml. Centrifugation on an isoosmotic medium with a density of 1.077 g/mL allows the RBCs and PMN leukocytes to sediment through the medium while retaining the mononuclear cells and CTCs at the sample/medium interface. Density gradient separation systems are commonly used in the art for the separation of CTCs and include, but are not limited to, Ficoll-Hypaque (Amersham), Lymphoprep (Nycomed), and OncoQuick ((Hexyl Gentech/Geiner Bio-One) (see, e.g. International Pat. Pub. Nos. WO 99/40221 and WO 00/46585). Such methods can be used in combination with oncolytic virus infection for detection of CTCs in the enriched sample. In the OncoQuick method, a porous membrane and a discontinuous gradient medium are employed to deplete mononuclear cells from the CTC fraction.

[0356] In exemplary methods, CTCs are enriched in a sample by applying the sample to a density gradient and centrifuging the sample to obtain a CTC enriched cell fraction. The enriched sample is then infected with the oncolytic reporter virus and expression of the reporter gene is detected, thereby detecting the CTCs in the enriched sample.

[0357] In some examples, the sample applied to the density gradient is a sample from a subject that has been administered an oncolytic reporter virus. In exemplary methods, CTCs are enriched in a sample from a subject administered an oncolytic reporter virus by applying the sample to the density gradient, centrifuging the sample to obtain a CTC enriched cell fraction, and then detecting the expression of the reporter gene in the enriched fraction, thereby detecting the CTCs in the enriched sample.

[0358] For detection, typically the CTC enriched sample is extracted from gradient and layered onto slides using well known techniques (e.g., by the cytospin technique, or by culturing on poly-L-lysine-coated chamber slides). Following extraction, the cell can be washed in an appropriate buffer (e.g. PBS). In some examples, the cells are washed in an appropriate buffer (e.g. PBS) prior to virus infection.

[0359] In particular examples, the density gradient is an isoosmotic medium, such as Ficoll-Paque, with a density in the range of about 1.055 to 1.077 g/ml, such as for example, 1.055 to 1.065 g/ml. Generally, the cell separation medium does not to react with the body fluid or the cells present therein. Exemplary cell separation media include, but are not limited to, Ficoll (high mass polysaccharide that dissolves in aqueous solutions) or Percoll (medium containing colloidal silica particles coated with polyvinylpyrrolidone) or a Percoll- or Ficoll-like medium. Exemplary Ficoll-based density gradients include, but are not limited to, Ficoll-Isopaque, Ficoll-Paque Plus, Ficoll-Paque Premium and Ficoll-Hypaque.

[0360] In some examples, a porous barrier is layered on above the density gradient to prevent mixing of whole blood with the density gradient prior to centrifugation and to provide increased depletion of mononuclear cells from CTCs. The porous barrier can be made of any suitable material. Suitable examples include, but are not limited to, plastics, metal, ceramic or a mixture or special alloy of these materials. In a particular example, the porous barrier contains a hydrophobic material or is coated with a hydrophobic material. In some examples, the porous barrier has a thickness of at or about 0.5 to 10 mm, for example, 1 to 5 mm. In some examples, the porous barrier has a pore size of about 5-100 μm, such as, for example, 6-50 μm, such as, for example, about 8-30 μm, such as, for example, about 10-30 μm, such as, for example, about 20-30 μm.

[0361] In some examples, the sample is diluted with saline or other suitable buffer prior to application to the gradient. For example the sample can be diluted in a suitable buffer at a ratio of 1:1, 1:2, 1:3, 1:4, 1:5, 1:6, 1:7, 1:8, 1:9, 1:10 or greater.

[0362] In some examples, the centrifugation is performed at about 500 to 2,000×g, for example at about 1,000×g, for about 10 to 30 minutes, for example, about 20 to 30 minutes. The temperature during the centrifugation is typically about 4° C. to minimize catalytic activity of proteases, DNAses and RNAses.

[0363] g. Selective Cell Lysis (RBC lysis of blood cells)

[0364] In some examples, a tumor cell enrichment method involves removal of red blood cells from a blood cell sample. For example, red blood cells are sensitive to lysis in a hypotonic medium (i.e. low solute concentration), and thus can be selectively lysed in a sample containing a mix population of cells while leaving the remaining non-RBCs intact. The RBCs take up water by osmosis and burst open leaving an empty membrane sack, or ghost, behind.

[0365] In exemplary methods, hypotonic solution is added to a blood sample and the sample is incubated until the sample is clear or substantially clear, indicating that the red blood cells in the sample are lysed. The sample typically is then centrifuged to pellet the remaining enriched cells. The enriched cells are then resuspended in an appropriate buffer and infected with the oncolytic reporter virus for detection of CTCs according to the methods provided.

[0366] In some examples, the red blood cells in a blood sample from a subject is lysed and the enriched sample is layered onto one or more slides, for example, by cytospin. In particular examples, the red blood cells in a blood sample from a subject is lysed, and the enriched sample is infected with the oncolytic reporter virus prior to layering on the slides by cytospin. Following incubation with the virus, the infected sample is layered onto slide by cytospin, and the CTCs in the sample are then detected by detection of the reporter protein expressed by the oncolytic reporter virus.

[0367] h. Combinations of Tumor Cell Enrichment Methods

[0368] In some examples, two or more tumor cell enrichment methods are performed in combination with infection with an oncolytic reporter virus. In such examples, the sample can be infected prior to, during, or following performance of a first tumor cell enrichment method on the sample, or prior to, during, or following performance of a second or subsequent tumor cell enrichment method. In some examples, the sample is one obtained from a subject previously treated with an oncolytic reporter virus, and two or more tumor cell enrichment methods are performed on the sample prior to detection of the infected CTCs.

[0369] In particular examples, the red blood cells of a blood sample from a subject are lysed and then a second tumor cell enrichment method is applied to the sample. For example, the red blood cells of a blood sample from a subject can be lysed and then the enriched sample is further enriched by passing the sample through a microfilter or a microfluidic device. In another example, the red blood cells of a blood sample from a subject can be lysed and then the enriched sample is further enriched by performing immunomagnetic separation based on CTC specific cell markers on the sample (e.g. Ariol system; see, e.g. Deng et al. (2008) Breast Cancer Res. 10:R69).

[0370] 3. Detection Methods

[0371] Any appropriate method known in the art can be employed to detect an expressed reporter protein, including, but not limited to, fluorescent, luminescent, spectrophotometric, chromogenic assays, or radioactive detection methods, which can be used to detect proteins, either directly, or indirectly, such as by enzymatic reaction or immunological detection. It is within the level of one of skill in the art to detect a reporter protein expressed by a cell infected with a reporter virus using an appropriate method based on the type of reporter protein employed.

[0372] In some examples, a fluorescent protein or a fluorescent product derived from a fluorogenic substrate is detected with a fluorometer, a fluorescence microscope (e.g., with an Olympus inverted fluorescence microscope (Olympus, Tokyo, Japan)), fluorescence confocal laser scanning microscope, a flow cytometer (e.g., a FACScan flow cytometer (BD Biosciences)) or a combination thereof. In some examples, a chromogenic or spectrophotometric substrate or signal is detected with a spectrophotometer. In some examples, a radioactive substrate or signal is detected by scintillation counter, scintigraphy, gamma camera, a β+ detector, a γ detector, or a combination thereof. In some examples, photon emission, such as that emitted by a luciferase, can be detected by light sensitive apparatus such as a luminometer or modified optical microscopes. In some examples, a signal can be detected with a Raman spectrometer.

[0373] In some examples, a substrate is detected when changes in fluorescent or optical properties, such as wavelength changes, intensity changes or changes in absorption, occur upon activation or cleavage by the reporter protein. In some examples, detection is effected by capturing with an antibody presented on a nanoparticle (see, e.g., Wang et al. (2011) Analyst. 136:4295-4300).

[0374] Detection of a signal produced by the reporter protein can be done by an automated system, such as software program or intelligence system that is part of, or compatible with, the equipment (e.g. computer platform) on which the assay is carried out. Alternatively, this comparison can be done by a physician or other trained or experienced professional or technician. In some examples, a signal can be detected and processed using an automated microscope, such as an automated fluorescence microscope (e.g. Ikoniscope imaging system, Ikonisys, Tokyo, Japan; see e.g. U.S. Patent Pub No. 2009/0123054) or an automated flow cytometer (e.g., a FACScan flow cytometer (BD Biosciences)). Data can be processed by means of computer software interfaced with the detecting means. The software can be configured to produce appropriate activating wavelengths or energies for the particular detectable protein used, such as a green fluorescent protein or a red fluorescent protein. Analysis can be based on input received from the detector such as whether signal is detected or not. Determination of whether the cell is a cancer cell, a CTC, can be based upon a pre-determined algorithm, such as for example, detection of multiple signals.

[0375] In exemplary methods, where the method involves a tumor cell enrichment method performed with a microfilter or a microfluidic device, detection of a reporter protein is performed directly on the microfilter or a microfluidic device. For example, CTCs infected with an oncolytic reporter virus can be detected directly on the microfilter or a microfluidic device without additional processing steps. In other examples, the CTCs infected with an oncolytic reporter virus can be recovered from the microfilter or microfluidic device and then detected for example in solution or transferred to solid support, such as a microscope slide.

[0376] 4. Samples for Use in the Methods

[0377] Exemplary methods provided herein involve detecting a circulating tumor cell (CTC) in a sample from a subject. CTCs can be detected and characterized from any suitable sample type. The sample can be any sample that contains one or more CTCs for detection.

[0378] The sample can be from any tissue or fluid from an organism. Samples include, but are not limited, to whole blood, dissociated bone marrow, bone marrow aspirate, pleural fluid, peritoneal fluid, central spinal fluid, abdominal fluid, pancreatic fluid, cerebrospinal fluid, brain fluid, ascites, pericardial fluid, urine, saliva, bronchial lavage, sweat, tears, ear flow, sputum, hydrocele fluid, semen, vaginal flow, milk, amniotic fluid, and secretions of respiratory, intestinal or genitourinary tract. In particular examples, the sample is from a fluid or tissue that is part of, or associated with, the lymphatic system or circulatory system. In some examples, the sample is a blood sample that is a venous, arterial, peripheral, tissue, cord blood sample. In particular examples the sample is anticoagulated whole blood.

[0379] In some examples a particular fluid sample can be selected for use in the methods based on the type of cancer exhibited by the subject and/or the location of the tumor in the subject. In non-limiting examples, a urine sample can be selected for detection of CTCs in a subject with a bladder cancer; bronchial lavage or pleural fluid sample can be selected for detection of CTCs in a subject with lung cancer or subject suspected of having lung metastases, cerebrospinal fluid sample can be selected for detection of CTCs in a subject with central nervous system metastases, and a pancreatic fluid sample for detection of CTCs in a subject with pancreatic cancer, an abdominal fluid or peritoneal fluid sample can be selected for detection of CTCs in a subject with an abdominal organ cancer.

[0380] Fluid samples include any liquid sample into which cells have been introduced. For example, fluid samples can include culture media and liquefied tissue samples, and cell suspensions. In some examples, the fluid sample is generated by dissociation of cells in a tissue sample in an appropriate fluid medium. The tissue sample can be a biopsy sample. The biopsy sample can be a tumor biopsy sample or a biopsy sample of a tissue suspected of containing one or more cancer cells. The fluid sample also can be generated from a bone marrow sample by dissociation of bone marrow cells in an appropriate fluid medium.

[0381] a. Sources

[0382] The sample for use in the methods provided can be from a subject that has cancer, is suspected of having cancer, or is at risk for developing a cancer. In some examples, the sample is from a subject that is in cancer remission or is at risk of cancer recurrence. The sample can be from a subject that has not received an anticancer therapy or can be from a subject that has been administered one or more anticancer therapies. In some examples, the sample is obtained from a subject prior to treatment with an anti cancer therapy. In some examples, the sample is obtained from a subject following treatment with an anti cancer therapy.

[0383] In some examples, the sample is from a subject that has cancer. In some examples, the sample is from a subject that has a tumor. In some examples, the tumor is a solid tumor. In some examples, the tumor is a metastatic tumor. In some examples, the sample is from a subject that has a pre-cancerous lesion (dysplasia), carcinoma, adenocarcinoma, or a sarcoma. In some examples, the subject has a tumor and is at risk of metastasis of the tumor. In some examples, the sample is from a subject having an advanced stage cancer. In some examples, the subject has a hemopoietic cancer.

[0384] In some examples, the subject has a cancer that is acute lymphoblastic leukemia, acute lymphoblastic leukemia, acute myeloid leukemia, acute promyelocytic leukemia, adenocarcinoma, adenoma, adrenal cancer, adrenocortical carcinoma, AIDS-related cancer, AIDS-related lymphoma, anal cancer, appendix cancer, astrocytoma, basal cell carcinoma, bile duct cancer, bladder cancer, bone cancer, osteosarcoma/malignant fibrous histiocytoma, brainstem glioma, brain cancer, carcinoma, cerebellar astrocytoma, cerebral astrocytoma/malignant glioma, ependymoma, medulloblastoma, supratentorial primitive neuroectodermal tumor, visual pathway or hypothalamic glioma, breast cancer, bronchial adenoma/carcinoid, Burkitt lymphoma, carcinoid tumor, carcinoma, central nervous system lymphoma, cervical cancer, chronic lymphocytic leukemia, chronic myelogenous leukemia, chronic myeloproliferative disorder, colon cancer, cutaneous T-cell lymphoma, desmoplastic small round cell tumor, endometrial cancer, ependymoma. epidermoid carcinoma, esophageal cancer, Ewing's sarcoma, extracranial germ cell tumor, extragonadal germ cell tumor, extrahepatic bile duct cancer, eye cancer/intraocular melanoma, eye cancer/retinoblastoma, gallbladder cancer, gallstone tumor, gastric/stomach cancer, gastrointestinal carcinoid tumor, gastrointestinal stromal tumor, giant cell tumor, glioblastoma multiforme, glioma, hairy-cell tumor, head and neck cancer, heart cancer, hepatocellular/liver cancer, Hodgkin lymphoma, hyperplasia, hyperplastic corneal nerve tumor, in situ carcinoma, hypopharyngeal cancer, intestinal ganglioneuroma, islet cell tumor, Kaposi's sarcoma, kidney/renal cell cancer, laryngeal cancer, leiomyoma tumor, lip and oral cavity cancer, liposarcoma, liver cancer, non-small cell lung cancer, small cell lung cancer, lymphomas, macroglobulinemia, malignant carcinoid, malignant fibrous histiocytoma of bone, malignant hypercalcemia, malignant melanomas, marfanoid habitus tumor, medullary carcinoma, melanoma, merkel cell carcinoma, mesothelioma, metastatic skin carcinoma, metastatic squamous neck cancer, mouth cancer, mucosal neuromas, multiple myeloma, mycosis fungoides, myelodysplastic syndrome, myeloma, myeloproliferative disorder, nasal cavity and paranasal sinus cancer, nasopharyngeal carcinoma, neck cancer, neural tissue cancer, neuroblastoma, oral cancer, oropharyngeal cancer, osteosarcoma, ovarian cancer, ovarian epithelial tumor, ovarian germ cell tumor, pancreatic cancer, parathyroid cancer, penile cancer, pharyngeal cancer, pheochromocytoma, pineal astrocytoma, pineal germinoma, pineoblastoma, pituitary adenoma, pleuropulmonary blastoma, polycythemia vera, primary brain tumor, prostate cancer, rectal cancer, renal cell tumor, reticulum cell sarcoma, retinoblastoma, rhabdomyosarcoma, salivary gland cancer, seminoma, Sezary syndrome, skin cancer, small intestine cancer, soft tissue sarcoma, squamous cell carcinoma, squamous neck carcinoma, stomach cancer, supratentorial primitive neuroectodermal tumor, testicular cancer, throat cancer, thymoma, thyroid cancer, topical skin lesion, trophoblastic tumor, urethral cancer, uterine/endometrial cancer, uterine sarcoma, vaginal cancer, vulvar cancer, Waldenstrom's macroglobulinemia or Wilm's tumor. In particular examples, the cancer is a cancer of the bladder, brain, breast, bone marrow, cervix, colon/rectum, kidney, liver, lung/bronchus, ovary, pancreas, prostate, skin, stomach, thyroid, or uterus.

[0385] In some examples, the sample is obtained from a subject that is a mammal. Exemplary mammalian subjects include, but are not limited to primates, such as humans, apes and monkeys; rodents, such as mice, rats, rabbits, and ferrets; ruminants, such as goats, cows, deer, and sheep; horses, pigs, dogs, cats, and other animals. In some examples, the sample is obtained from a patient. In some examples, the patient is a human patient.

[0386] b. Methods of Obtaining Samples

[0387] The samples can be obtained from the subject by any suitable means of obtaining the sample using well-known and routine clinical methods. Procedures for obtaining fluid samples from a subject are well known. For example, procedures for drawing a processing whole blood and lymph are well-known and can be employed to obtain a sample for use in the methods provided. Typically, for collection of a blood sample, an anti-coagulation agent (e.g. EDTA, or citrate and heparin or CPD (citrate, phosphate, dextrose) or comparable substances) is added to the sample to prevent coagulation of the blood. In some examples, the blood sample is collected in a collection tube that contains an amount of EDTA to prevent coagulation of the blood sample.

[0388] In some examples, the sample is a tissue biopsy and is obtained, for example, by needle biopsy, CT-guided needle biopsy, aspiration biopsy, endoscopic biopsy, bronchoscopic biopsy, bronchial lavage, incisional biopsy, excisional biopsy, punch biopsy, shave biopsy, skin biopsy, bone marrow biopsy, and the Loop Electrosurgical Excision Procedure (LEEP). Typically, a non-necrotic, sterile biopsy or specimen is obtained that is greater than 100 mg, but which can be smaller, such as less than 100 mg, 50 mg or less, 10 mg or less or 5 mg or less; or larger, such as more than 100 mg, 200 mg or more, or 500 mg or more, 1 g or more, 2 g or more, 3 g or more, 4 g or more or 5 g or more. The sample size to be extracted for the assay can depend on a number of factors including, but not limited to, the number of assays to be performed, the health of the tissue sample, the type of cancer, and the condition of the patient. The tissue is placed in a sterile vessel, such as a sterile tube or culture plate, and can be optionally immersed in an appropriate media. Typically, the cells are dissociated into cell suspensions by mechanical means and/or enzymatic treatment as is well known in the art.

[0389] Samples can be obtained from the subject at regular intervals, such as, for example, one day, two days, three days, four days, five days, six days, one week, two weeks, weeks, four weeks, one month, two months, three months, four months, five months, six months, or one year, or daily, weekly, bimonthly, quarterly, biyearly or yearly. Collection of samples can be performed at a predetermined time or at regular intervals relative to treatment with one or more anticancer agents. For example, a sample can be collected at a predetermined time or at regular intervals prior to, during, or following treatment or between successive treatments. In particular examples, a sample is obtained from the subject prior to administration of an anticancer therapy and then again at regular intervals after treatment has been effected.

[0390] The volume of a fluid sample can be any volume that is suitable for the detection of a CTC in the methods provided. In some examples, the volume for the fluid sample is dependent on the particular tumor cell enrichment method used. For example, particular tumor cell enrichment methods can require a larger or smaller fluid sample volumes depending on factors such as, but not limited to, the capacity of the device or method used and level of throughput of the tumor cell enrichment method. In some examples a fluid sample is diluted in an appropriate medium prior to application of the tumor cell enrichment method. In some examples, a fluid sample is obtained from a subject and a portion or aliquot of the sample is used in the tumor cell enrichment method. The portion or aliquot can be diluted in an appropriate medium prior to application of the tumor cell enrichment method.

[0391] In some examples the volume of the fluid sample is about 0.01 mL to about 50 mL, such as, for example, about 0.1 mL to about 10 mL. In non-limiting examples, the volume of the sample can be at least about 0.01 ml, 0.05 ml, 0.1 ml, 0.2 ml, 0.3 ml, 0.4 ml, 0.5 ml, 1 ml, 2 ml, 3 ml, 4 ml, 5 ml, 6 ml, 7 ml, 8 ml, 9 ml, 10 ml, 15 ml, 20 ml, 25 ml, 30 ml, 35 ml, 40 ml, 45 ml, 50 mL or more.

[0392] c. Control Samples

[0393] In some examples of the methods provided herein, samples are analyzed for the detection and enumeration of CTCs and compared to a control or reference sample. Control samples to which the subject's samples are compared can be sample obtained from a cancer patient with the same cancer type and/or same stage of cancer where the control sample is known to contain a particular level of CTCs. In some examples, a control sample can be a sample from a subject without any detectable cancer. In some examples, a control sample can be a sample from normal tissue without any detectable cancer. In some examples, a control sample can be a sample from a subject prior to treatment with an anticancer therapy, where the control sample is compared to a sample from the subject following treatment with an anticancer therapy.

[0394] 5. Viruses for Use in the Method

[0395] a. General Characteristics for Virus Selection

[0396] Any virus that preferentially infects tumor cells compared to non-tumor cells and is detectable can be can be used in the methods provided herein. Such viruses are typically known in the art as oncolytic viruses. Viruses for use in the methods can be modified to express a reporter gene for detection of infected tumor cells can be used in the methods provided herein. One of skill in the art can readily identify such viruses, and can adapt them for the methods described herein for detection and enumeration of CTCs. In particular examples, the oncolytic viruses used herein are vaccinia viruses, such as for example, LIVP viruses.

[0397] Viruses used in the methods described herein also can be further modified to improve the suitability of the virus for use as a reporter virus, such as the selection of an appropriate reporter gene and regulatory elements for expression of the reporter gene as described herein. In exemplary methods where the oncolytic reporter virus is administered to a subject, it is desirable to select an attenuated virus.

[0398] In some examples, where a sample is infected ex vivo, the virus employed in the methods has a relatively short time course of infection, such that expression of the reporter gene can be assayed within about 6-24 hours after infection. The use of such viruses in the method ensures that results can be obtained in the shortest possible time. Viruses that exhibit a longer time course of infection also can be used, and the time taken to complete the method can be lengthened.

[0399] Viruses can have a range of effects on their host cell, including inhibition of host RNA, DNA or protein synthesis and cell death. The presence of the virus often gives rise to morphological changes in the host cell. Any detectable changes in the host cell due to infection are known as cytopathic effects, and can include cell rounding, disorientation, swelling or shrinking, detachment from the growth surface and cell death. Cell death can be due to, for example, cell lysis following release of progeny viruses, or the induction of apoptosis. In some instances, however, cell death is not imminent following infection, such as in the case of a latent infection when the viral nucleic acid sequence is incorporated into the cell but the cell is not actively producing viral particles (e.g., Herpes simplex virus), or when there is continued, low-level release of virions in the absence of rapid and severe host cell damage (e.g., hepatitis B virus and HIV). The severity and the rate at which these effects are observed vary widely, and can influence the suitability of a virus for use as a reporter virus in the CTC detection methods. For the purposes herein, a virus that induces rapid cell death or apoptosis may not be suitable for use a reporter virus, as such changes will affect the accuracy of CTC detection method. Assays for determining the infection profile and effects on host cells are well-known in the art and can be employed for selecting an appropriate oncolytic reporter virus for use in the methods.

[0400] b. Expression of a Reporter Gene Product

[0401] The viruses used in the methods provided herein are modified to express one or more heterologous genes. Gene expression can include expression of a protein encoded by a gene and/or expression of an RNA molecule encoded by a gene. For use in the methods provided, the viruses are modified express one or more genes whose products are detectable or whose products can provide a detectable signal. These genes are often called “reporter genes”, and their products are called “reporter proteins” or “reporter gene products”. A reporter gene and its product are generally amenable to assays that are sensitive, quantitative, rapid, easy and reproducible. Many reporter genes have been described in the art, and their detection can be effected in a variety of ways. These heterologous genes can be introduced into the viruses and used to easily assess, for example, the activity of the promoter under which the reporter gene is controlled, the level of transcription and/or translation of the virally encoded genes, and in some instances, by inference, certain activities of the host cell in which the virus resides. In some examples, the reporter protein interacts with host cell proteins, resulting in a detectable change in the properties of the reporter protein. Expression of heterologous genes can be controlled by a constitutive promoter, or by an inducible promoter. Expression also can be influenced by one or more proteins or RNA molecules expressed by the virus. Host cell factors also can influence the expression of heterologous genes. Depending upon the factors that influence the expression of the reporter gene, the level of expression of the reporter gene can be used as an indicator for various processes within the virus, or within the host cell in which the virus grows. For example, if expression of the reporter gene relies on viral factors produced only after viral DNA replication occurs, then the level of the expression of the reporter gene can be used as a measure of the level of viral DNA replication.

### i. Exemplary Reporter Proteins

[0402] A variety of reporter genes that encode detectable proteins are known in the art, and can be expressed in the viruses in the methods provided herein. Detectable proteins include receptors or other proteins that can specifically bind a detectable compound, proteins that can emit a detectable signal such as a fluorescence signal, and enzymes that can catalyze a detectable reaction or catalyze formation of a detectable product. Thus, reporter proteins can be assayed by detecting endogenous characteristics, such as enzymatic activity or spectrophotometric characteristics, or indirectly with, for example, antibody-based assays.

### (1) Fluorescent Proteins

[0403] In some examples, the oncolytic reporter viruses can express a gene encoding a protein that is a fluorescent protein. Fluorescent proteins emit fluorescence by absorbing and re-radiating the energy of light. Fluorescence can yield relatively high levels of light, compared to, for example, chemiluminescence, and is readily detected by various means known in the art and described herein. Many fluorescent proteins are known in the art and have been widely used as reporter proteins. The first cloned of these, and the most well-known, is green fluorescent protein (GFP) from the Aequorea victoria (Prasher et al. (1987) Gene 111: 229-233), which is a 27 kDa protein that produces a green fluorescence emission with a peak wavelength at 507 nm following excitation at either 395 or 475 nm. GFP also has been cloned from Aequorea coerulescens (Gurskaya et al. (2003) Biochem J. 373:403-408). The wild-type GFP gene has been modified by, for example, point mutation, optimizing codon usage or introducing a Kozak translation initiation site, to generate multiple variants with improved and/or alternate properties. For example, a variant termed enhanced green fluorescent protein (EGFP) contains a single point mutation that shifts the excitation wavelength to 488 nm, which is in the cyan region, and optimized codon usage which yields greater expression in mammalian systems (Yang et al. (1996) Nucl Acids Res. 24 4592-4593). Other variants are spectral variants which display blue, cyan and yellowish-green fluorescent emissions, generally referred to as blue fluorescent protein (BFP), cyan fluorescent protein (CFP), and yellow fluorescent protein (YFP). Examples of these and other variants of GFP include, but are not limited to, those described in U.S. Pat. Nos. 5,625,048, 5,804,387, 6,027,881, 6,150,176, 6,265,548, and 6,608,189.

[0404] GFP-like proteins have been isolated from other organisms, particularly the reef corals in the class Anthazoa. While some of the GFP-like proteins emit a green fluorescence, such as the green fluorescent protein from the anthozoan coelenterates Renilla reniformis and Renilla kollikeri (sea pansies) (U.S. Pat. Pub. No. 2003/0013849), others fluoresce with an even wider range of colors than the GFP variants, including blue, green, yellow, orange, red and purple (see e.g., U.S. Pat. No. 7,166,444, Miyawaki et al. (2002) Cell Struct Func 27: 343-347, Labas et al. (2002) Proc. Natl. Acad. Sci. USA 99:4256-4261). Examples of the GFP-like fluorescent proteins include, but are not limited to, those set forth in Table 3.

TABLE 3
Examples of GFP-Iike proteins

| | | Excitation | Emission | |
|---|---|---|---|---|
| Protein ID | | maxima | maxima | |
| (alternate ID) | Species | (nm) | (nm) | Color |
| amajGFP | Anemonia majano | 458 | 486 | green |
| (amFP486) | | | | |
| dsfrGFP (DsFP483) | Discosoma striata | 456 | 484 | green |
| clavGFP (CFP484) | Clavularia sp. | 443 | 483 | green |
| cgigGFP | Condylactis gigantea | 399, 482 | 496 | green |
| hcriGFP | Heteractis crispa | 405, 481 | 500 | green |
| ptilGFP | Ptilosarcus sp. | 500 | 508 | green |
| rmueGFP | Renilla muelleri | 498 | 510 | green |
| zoanGFP (zFP560) | Zoanthus sp. | 496 | 506 | green |
| asulGFP (asFP499) | Anemonia sulcata | 403, 480 | 499 | green |
| dis3GFP | Discosoma sp.3 | 503 | 512 | green |
| dendGFP | Dendronephthya sp. | 494 | 508 | green |
| mcavGFP | Montastraea cavernosa | 506 | 516 | green |
| rfloGFP | Ricordea florida | 508 | 518 | green |
| scubGFP1 | Scolymia cubensis | 497 | 506 | green |
| scubGFP2 | Scolymia cubensis | 497 | 506 | green |
| zoanYFP | Zoanthus sp. | 494, 528 | 538 | yellow |
| DsRed (drFP583) | Discosoma sp. 1 | 558 | 583 | orange-red |
| dis2RFP (dsFP593) | Discosoma sp. 2 | 573 | 593 | orange-red |
| zoan2RFP | Zoanthus sp.2 | 552 | 576 | orange-red |
| cpFP611 | Entacmaea quadricolor | 559 | 611 | orange-red |
| mcavRFP | Montastraea cavernosa | 508, 572 | 520, 580 | orange-red |
| rfloRFP | Ricordea florida | 506, 566 | 517, 574 | orange-red |
| Kaede | Trachyphillia geoffroyi | 508, 572 | 518, 582 | orange-red |
| asulCP (asCP) | Anemonia sulcata | 568 | none | purple-blue |
| hcriCP (hcCP) | Heteracis crispa | 578 | none | purple-blue |
| cgigCP (cpCP) | Condylactis gigantea | 571 | none | purple-blue |
| cpasCP (cpCP) | Condylactis parsiflora | 571 | none | purple-blue |
| gtenCP (gtCP) | Goniopora tenuidens | 580 | none | purple-blue |

*Adapted from Miyawaki et al. (2002) Cell Struct Funct 27, 343-34.

[0405] Exemplary GFP variants and variants of GFP-like proteins from variety of species are known and can be employed for expression by an oncolytic virus provided herein. Such fluorescent proteins include monomeric, dimeric and tetrameric fluorescent proteins. Exemplary monomeric fluorescent proteins include, but are not limited to: violet fluorescent proteins, such as for example, Sirius; blue fluorescent proteins, such as for example, Azurite, EBFP, SBFP2, EBFP2, TagBFP; cyan fluorescent proteins, such as for example, mTurquoise, eCFP, Cerulean, SCFP, TagCFP, mTFP1; green fluorescent proteins, such as for example, GFP, mUkG1, aAG1, AcGFP1, TagGFP2, EGFP, mWasabi, EmGFP (Emerald); yellow fluorescent proteins, such as for example; TagYFP, EYFP, Topaz, SYFP2, YPet, Venus, Citrine; orange fluorescent proteins, such as for example, mKO, mKO2, mOrange, mOrange2, red fluorescent proteins, such as for example; TagRFP, TagRFPt, mStrawberry, mRuby, mCherry; far red fluorescent proteins, such as for example; mRasberry, mKate2, mPlum, and mNeptune; and fluorescent proteins having an increased stokes shift (i.e. >100 nm distance between excitation and emission spectra), such as for example, Sapphire, T-Sapphire, mAmetrine, and mKeima. Exemplary dimeric and tetrameric fluorescent proteins include, but are not limited to: AmCyan1, Midori-Ishi Cyan, copGFP (ppluGFP2), TurboGFP. ZsGreen, TurboYFP, ZsYellow1, TurboRFP, dTomato, DsRed2, DsRed-Express, DsRed-Express2, DsRed-Max, AsRed2, TurboFP602, RFP611, Katushka (TurboFP635), Katushka2, and AQ143. Excitation and emission spectra for exemplary fluorescent proteins are well-known in the art (see also e.g. Chudakov et al. (2010) Physiol Rev 90:1102-1163).

[0406] In particular examples, a GFP or GFP-like protein is selected for expression by an oncolytic virus for use in the methods provided herein. In other particular examples, a red or far-red fluorescent protein is selected for expression by an oncolytic virus for use in the methods provided herein. In further particular examples, the fluorescent protein Katushka (TurboFP635) protein is selected for expression by an oncolytic virus for use in the methods provided herein.

[0407] Selection of a particular fluorescent protein for use in the methods depends on variety of factors including, but not limited to, brightness, maturation rate, photostability, aggregation and pH stability of the fluorescent protein (see e.g. Chudakov et al. (2010) Physiol Rev 90:1102-1163). Typically, for the methods provided herein, a fluorescent protein for expression by an oncolytic reporter virus is selected to provide a detectable signal within a reasonable time following infection of the tumor cell. In exemplary methods provided herein, where detection of the fluorescent protein is performed on a microfilter or a microfluidic chip, a fluorescent protein for expression by an oncolytic reporter virus is typically selected to minimize background autofluorescence of the microfilter or microfluidic chip.

[0408] Other proteinaceous fluorophores include phycobiliproteins from certain cyanobacteria and eukaryotic algae. These proteins are among the most highly fluorescent known (Oi et al. (1982) J. Cell Biol. 93:981-986), and systems have been developed that are able to detect the fluorescence emitted from as little as one phycobiliprotein molecule (Peck et al. (1989) Proc. Natl. Acad. Sci. USA 86:4087-4091). Phycobiliproteins are classified on the basis of their color into two large groups, the phycoerythrins (red) and the phycocyanins (blue). Examples of fluorescent phycobiliproteins include, but are not limited to, R-Phycoerythrin (R-PE), B-Phycoerythrin (B-PE), Y-Phycoerythrin (Y-PE), C-Phycocyanin (P-PC), R-Phycocyanin (R-PC), Phycoerythrin 566 (PE 566), Phycoerythrocyanin (PEC) and Allophycocyanin (APC). The genes encoding the phycobiliproteins have been cloned from a multitude of species and have been used to express the fluorescent proteins in a heterologous host (Tooley et al. (2001) Proc. Natl. Acad. Sci. USA 98:10560-10565). The genes required for the expression of these or any other fluorophores can be cloned into the viruses used in the methods provided herein to generate a virus with a fluorescent reporter protein.

### (2) Bioluminescent Proteins

[0409] In some examples, the oncolytic reporter viruses can express a gene encoding a protein that is a bioluminescent protein. Chemiluminescence is a process in which photons are produced when molecules in an excited state transition to a lower energy level in an exothermic chemical reaction. The chemical reactions required to generate the excited states in this process generally proceed at a relatively low rate compared to, for example, fluorescence, and so yield a relatively low rate of photon emission. Because the photons are not required to create the excited states, they do not constitute an inherent background when measuring photon efflux, which permits precise measurement of very small changes in light. Bioluminescence is a form of chemiluminescence that has developed through evolution in a range of organisms, and is based on the interaction of the enzyme luciferase with a luminescent substrate luciferin. The luciferases can produce light of varying colors. For example, the luciferases from click beetles can produce light with emission peaks in the range of 547 to 593 nm, spanning four colors (Wood et al. (1989) Science 244:700-702).

[0410] Thus, luciferases for use in the methods provided are enzymes or photoproteins that catalyze a bioluminescent reaction (i.e., a reaction that produces bioluminescence). Some exemplary luciferases, such as firefly, Gaussia and Renilla luciferases, are enzymes which act catalytically and are unchanged during the bioluminescence generating reaction. Other exemplary luciferases, such as the aequorin photoprotein to which luciferin is non-covalently bound, are changed, such as by release of the luciferin, during bioluminescence-generating reaction. The luciferase can be a protein, or a mixture of proteins (e.g., bacterial luciferase). The protein or proteins can be native, or wild luciferases, or a variant or mutant thereof, such as a variant produced by mutagenesis that has one or more properties, such as thermal stability, that differ from the naturally-occurring protein. Luciferases and modified mutant or variant forms thereof are well known. For purposes herein, reference to luciferase refers to either the photoproteins or luciferases.

[0411] Exemplary genes encoding bioluminescent proteins include, but are not limited to, bacterial luciferase genes from Vibrio harveyi (Belas et al. (1982) Science 218:791-793), and Vibrio fischerii (Foran and Brown, (1988) Nucleic acids Res. 16:177), firefly luciferase (de Wet et al. (1987) Mol. Cell. Biol. 7:725-737), aequorin from Aequorea victoria (Prasher et al. (1987) Biochem. 26:1326-1332), Renilla luciferase from Renilla renformis (Lorenz et al. (1991) Proc. Natl. Acad. Sci. USA 88:4438-4442) and click beetle luciferase from Pyrophorus plagiophthalamus (Wood et al. (1989) Science 244:700-702). Other naturally occurring secreted luciferases include, for example, those from Vargula hilgendorfii, Cypridinia noctiluca, Oplophorus gracilirostris, Metridia longa and Gaussia princeps. Native and synthetic forms of the genes can be used in the methods provided herein. The luxA and luxB genes of bacterial luciferase can be fused to produce the fusion gene (Fab2), which can be expressed to produce a fully functional luciferase protein (Escher et al. (1989) Proc. Natl. Acad. Sci. USA 86:6528-6532). Transformation and expression of these and other genes encoding bioluminescent proteins in viruses can permit detection of viral infection, for example, using a low light and/or fluorescence imaging camera. In some examples, luciferases expressed by viruses can require exogenously added substrates such as decanal or coelenterazine for light emission. In other examples, viruses can express a complete lux operon, which can include proteins that can provide luciferase substrates such as decanal.

[0412] Bioluminescence substrates are the compounds that are oxidized in the presence of a luciferase and any necessary activators and which generates light. With respect to luciferases, these substrates are typically referred to as luciferins that undergo oxidation in a bioluminescence reaction. The bioluminescence substrates include any luciferin or analog thereof or any synthetic compound with which a luciferase interacts to generate light. Typical substrates include those that are oxidized in the presence of a luciferase or protein in a light-generating reaction. Bioluminescence substrates, thus, include those compounds that those of skill in the art recognize as luciferins. Luciferins, for example, include firefly luciferin, Cypridina (also known as Vargula) luciferin, coelenterazine, dinoflagellate luciferin, bacterial luciferin, as well as synthetic analogs of these substrates or other compounds that are oxidized in the presence of a luciferase in a reaction that produces bioluminescence.

### (3) Other Enzymes

[0413] In some examples, the oncolytic reporter viruses can express a gene encoding a protein that can catalyze a detectable reaction. Some commonly used reporter genes encode enzymes or other biochemical markers which, when active in the host cells, cause some visible change in the cells or their environment upon addition of the appropriate substrate. Two examples of this type of reporter are the E. coli genes lacZ (encoding β-galactosidase or “β-gal”) and gusA or iudA (encoding β-glucuronidase or “β-glu”). These bacterial sequences are useful as reporter genes because the cells in which they are expressed, prior to transfection, express extremely low levels (if any) of the enzyme encoded by the reporter gene. When host cells expressing the reporter gene (via heterologous expression from the virus) are incubated with an appropriate substrate, a detectable product is formed. The particular substrate used dictates the type of signal generated and the method of detection required. For example, β-galactosidase substrates include those that, when hydrolyzed by β-galactosidase, form products that can be detected, for example, by spectrophotometry (e.g., o-nitrophenyl-β-D-galactoside (ONPG) or 5-bromo-4-chloro-3-indolyl-β-D-galactopyranoside (X-gal)); fluorometry (e.g., a 4-methyl-umbelliferyl-β-galactopyranoside compound (MUG)); or via chemiluminescence (e.g., 1,2-dioxetane-galactopyranoside derivatives; Bronstein et al. (1996) Clin Chem. 42:1542-1546). Many substrates that facilitate the detection of enzymatic activity by various methods also exist for use with β-glucuronidase, including, but not limited to, 5-bromo-4-chloro-3-indolyl-β-D-glucuronic acid (X-Gluc), which produces a blue precipitate following hydrolysis; p-nitrophenyl β-D-glucuronide which also can be used in a spectrophotometrical format; 4-methylumbelliferyl-β-D-glucuronide (MUG), which can be used in a fluorometric assay; and sodium 3-(4-methoxyspiro{1,2-dioxetane-3,2′-(5′-chloro)-tricyclo[3.3.1.13,7]decan}-4-yl)phenyl-β-D-glucuronate (Glucurone; U.S. Pat. No. 6,586,196 and Bronstein et al. (1996) Clin Chem. 42:1542-1546), which can be used in a chemiluminescent assay.

[0414] Other exemplary reporter genes that can be expressed in the viruses used in the methods provided herein include secreted embryonic alkaline phosphatase (SEAP) and chloramphenicol acetyltransferase (CAT). SEAP is a truncated form of human placental alkaline phosphatase that is secreted into the cell culture supernatant following expression. The alkaline phosphatase activity can be readily assayed using any of the substrates known in the art, and can be visualized by chemiluminescence (e.g., using the substrate CSPD [disodium 3-(4-methoxyspiro[1,2-d]oxetane-3,2′(5′-chloro)-tricyclo[3,3,1,13,7)decan]-4-yl)phenyl phosphate]); fluorescence (e.g., using the substrate MUP [4-methylumbelliferyl phosphate]); or spectrometry (e.g., using the substrate p-nitrophenyl phosphate (PNPP)).

[0415] The bacterial gene encoding chloramphenicol acetyltransferase (CAT), which catalyzes the addition of acetyl groups to the antibiotic chloramphenicol also can be cloned into the viruses and used to express a reporter protein. CAT activity can be monitored in several ways. In one method, cells infected by the virus expressing the CAT reporter gene can be lysed and incubated in a reaction mix containing 14C- or 3H-labeled chloramphenicol and n-Butyryl Coenzyme A (n-Butyryl CoA). The expressed heterologous CAT transfers the n-butyryl moiety of the cofactor to chloramphenicol. The reaction products can be extracted, separated and the amount of radioactive n-butyryl chloramphenicol is assayed by liquid scintillation counting. The radioactive n-butyryl chloramphenicol resulting from CAT activity also can be analyzed using thin-layer chromatography.

[0416] Additional exemplary reporter genes include, but are not limited to enzymes, such as β-lactamase, alpha-amylase, peroxidase, T4 lysozyme, oxidoreductase and pyrophosphatase.

### (4) Proteins that Bind to Detectable Ligands

[0417] Exemplary detectable proteins also include proteins that can bind a contrasting agent, chromophore, or a compound or ligand that can be detected. In some examples, the ligand that binds to the detectable protein is covalently attached to a detectable moiety, such, for example a radiolabel, a chromogen, or a fluorescent moiety.

[0418] A variety of gene products that can specifically bind a detectable compound are known in the art, including, but not limited to receptors, metal binding proteins (e.g., siderophores, ferritins, transferrin receptors), ligand binding proteins, and antibodies. Any of a variety of detectable compounds can be used, and can be imaged by any of a variety of known imaging methods. Exemplary compounds include receptor ligands and antigens for antibodies. The ligand can be labeled according to the imaging method to be used. Exemplary imaging methods include, but are not limited to, X-rays, magnetic resonance methods, such as magnetic resonance imaging (MRI) and magnetic resonance spectroscopy (MRS), and tomographic methods, including computed tomography (CT), computed axial tomography (CAT), electron beam computed tomography (EBCT), high resolution computed tomography (HRCT), hypocycloidal tomography, positron emission tomography (PET), single-photon emission computed tomography (SPECT), spiral computed tomography and ultrasonic tomography.

[0419] Labels appropriate for X-ray imaging are known in the art, and include, for example, Bismuth (III), Gold (III), Lanthanum (III) or Lead (II); a radioactive ion, such as ⁶⁷Copper, ⁶⁷Gallium, ⁶⁸Gallium, ¹¹¹Indium, ¹¹³Indium, ¹²³Iodine, ¹²⁵Iodine, ¹³¹Iodine, ¹⁹⁷Mercury, ²⁰³Mercury, 186Rhenium, ¹⁸⁸Rhenium, ⁹⁷Rubidium, ¹⁰³Rubidium, ⁹⁹Technetium or ⁹⁰Yttrium; a nuclear magnetic spin-resonance isotope, such as Cobalt (II), Copper (II), Chromium (III), Dysprosium (III), Erbium (III), Gadolinium (III), Holmium (III), Iron (II), Iron (III), Manganese (II), Neodymium (III), Nickel (II), Samarium (III), Terbium (III), Vanadium (II) or Ytterbium (III); or rhodamine or fluorescein.

[0420] Labels appropriate for magnetic resonance imaging are known in the art, and include, for example, gadolinium chelates and iron oxides. Use of chelates in contrast agents is known in the art. Labels appropriate for tomographic imaging methods are known in the art, and include, for example, β-emitters such as ¹¹C, ¹³N, ¹⁵O or ⁶⁴Cu or γ-emitters such as ¹²³I. Other exemplary radionuclides that can, be used, for example, as tracers for PET include ⁵⁵Co, ⁶⁷Ga, ⁶⁸Ga, ⁶⁰Cu(II), ⁶⁷Cu(II), ⁵⁷Ni, ⁵² Fe and ¹⁸F (e.g., ¹⁸F-fluorodeoxyglucose (FDG)). Examples of useful radionuclide-labeled agents are a ⁶⁴Cu-labeled engineered antibody fragment (Wu et al. (2002) Proc. Natl. Acad. Sci. USA 97: 8495-8500), ⁶⁴Cu-labeled somatostatin (Lewis et al. (1999) J. Med. Chem. 42: 1341-1347), ⁶⁴Cu-pyruvaldehyde-bis(N4-methylthiosemicarbazone)(⁶⁴Cu-PTSM) (Adonai et al. (2002) Proc. Natl. Acad. Sci. USA 99: 3030-3035), ⁵²Fe-citrate (Leenders et al. (1994) J. Neural. Transm. Suppl. 43: 123-132), ⁵²Fe/^{52m}Mn-citrate (Calonder et al. (1999) J. Neurochem. 73: 2047-2055) and ⁵²Fe-labeled iron (III) hydroxide-sucrose complex (Beshara et al. (1999) Br. J. Haematol. 104: 288-295, 296-302).

### (5) Transporter Proteins (Transporters)

[0421] Membrane transport protein are involved in the movement of ions, small molecules, or macromolecules, such as other proteins, across a membrane. Transport proteins are integral membrane proteins that span the membrane across which they transport substances. Viruses for use in the methods provided herein can encode these proteins.

[0422] These proteins assist in the movement of substances by facilitated diffusion or active transport. Transporters can be located on the outer cell membrane, mitochondria or other intracellular organelles. When encoded by viruses as described herein, these transporters can function to transport and accumulate detectable and/or therapeutic substrates in cells, such as tumor cells, that are infected by the viruses. For example, transporters can provide signal amplification through transport-mediated concentrative intracellular accumulation of radiolabeled substrates for use in imaging, and can provide a means to deliver therapeutic substances to virally-targeted tumors. These transporters can be expressed on tumor cells, providing a target for capture of the tumor cells.

[0423] Transporters can be classified and identified using various systems and databases well known in the art. Such systems can be used to help identify transporters that can be expressed in the viruses using the methods described herein, and to identify the substrates for each transporter. For example, the Transporter Classification database (TCDB; www.tcdb.org/) is an IUBMB (International Union of Biochemistry and Molecular Biology)-approved classification system for membrane transport proteins, including ion channels (Saier et al., (2006) Nucl. Acids. Res. 34:D181-D186). This was designed to be analogous to the EC number system for classifying enzymes, but it also uses phylogenetic information. The TC system classifies approximately 3000 proteins into over 550 transporter families. Another system is the Solute Carrier (SLC) gene nomenclature system, which is the basis for the Human Genome Organization (HUGO) names of the genes that encode this group of transporters, and includes over 300 members organized into 47 families. Members within an individual SLC family have greater than 20% sequence homology to each other. The criteria for inclusion of a family into the SLC group is functional (i.e., an integral membrane protein which transports a solute) rather than evolutionary. The SLC group include transporters that are facilitative transporters (allow solutes to flow downhill with their electrochemical gradients) and secondary active transporters (allow solutes to flow uphill against their electrochemical gradient by coupling to transport of a second solute that flows downhill with its gradient such that the overall free energy change is still favorable). The SLC group does not include ATP-driven transporters, ion channels or aquaporins. Most members of the SLC group are located in the outer cell membrane, although some members are located in mitochondria (most notably SLC family 25) or other intracellular organelles. Table 4 provides the SLC families (e.g. SLC1), the subfamilies (e.g. SLC1A) and the member of the family (e.g. SLC1A1, corresponding to “Solute carrier family 1, member 1”).

TABLE 4
Solute Carrier (SLC) Transporter families

| Family | Members |
|---|---|
| SLC1: The high affinity | SLC1A1, SLC1A2, SLC1A3, SLC1A4, SLC1A5, SLC1A6, |
| glutamate and neutral | SLC1A7 |
| amino acid transporter | |
| family | |
| SLC2: The facilitative | SLC2A1, SLC2A2, SLC2A3, SLC2A4, SLC2A5, SLC2A6, |
| GLUT transporter family | SLC2A7, SLC2A8, SLC2A9, SLC2A10, SLC2A11, |
| | SLC2A12, SLC2A13, SLC2A14 |
| SLC3: The heavy | SLC3A1, SLC3A2 |
| subunits of the | |
| heteromeric amino acid | |
| transporters | |
| SLC4: The bicarbonate | SLC4A1, SLC4A2, SLC4A3, SLC4A4, SLC4A5, SLC4A6, |
| transporter family | SLC4A7, SLC4A8, SLC4A9, SLC4A10, SLC4A11 |
| SLC5: The sodium | SLC5A1, SLC5A2, SLC5A3, SLC5A4, SLC5A5, SLC5A6, |
| glucose cotransporter | SLC5A7, SLC5A8, SLC5A9, SLC5A10, SLC5A11, |
| family | SLC5A12 |
| SLC6: The sodium- and | SLC6A1, SLC6A2, SLC6A3, SLC6A4, SLC6A5, SLC6A6, |
| chloride-dependent | SLC6A7, SLC6A8, SLC6A9, SLC6A10, SLC6A11, |
| neurotransmitter | SLC6A12, SLC6A13, SLC6A14, SLC6A15, SLC6A16, |
| transporter family | SLC6A17, SLC6A18, SLC6A19, SLC6A20 |
| SLC7: The cationic | SLC7A1, SLC7A2, SLC7A3, SLC7A4, SLC7A5, SLC7A6, |
| amino acid | SLC7A7, SLC7A8, SLC7A9, SLC7A10, SLC7A11, |
| transporter/glycoprotein- | SLC7A13, SLC7A14 |
| associated family | |
| SLC8: The Na+/Ca2+ | SLC8A1, SLC8A2, SLC8A3 |
| exchanger family | |
| SLC9: The Na+/H+ | SLC9A1, SLC9A2, SLC9A3, SLC9A4, SLC9A5, SLC9A6, |
| exchanger family | SLC9A7, SLC9A8, SLC9A9, SLC9A10, SLC9A11 |
| SLC10: The sodium bile | SLC10A1, SLC10A2, SLC10A3, SLC10A4, SLC10A5, |
| salt cotransport family | SLC10A6, SLC10A7 |
| SLC11: The proton | SLC11A1, SLC11A2 |
| coupled metal ion | |
| transporter family | |
| SLC12: The | SLC12A1, SLC12A1, SLC12A2, SLC12A3, SLC12A4, |
| electroneutral cation-Cl | SLC12A5, SLC12A6, SLC12A7, SLC12A8, SLC12A9 |
| cotransporter family | |
| SLC13: The human | SLC13A1, SLC13A2, SLC13A3, SLC13A4, SLC13A5 |
| Na+-sulfate/carboxylate | |
| cotransporter family | |
| SLC14: The urea | SLC14A1, SLC14A2 |
| transporter family | |
| SLC15: The proton | SLC15A1, SLC15A2, SLC15A3, SLC15A4 |
| oligopeptide | |
| cotransporter family | |
| SLC16: The | SLC16A1, SLC16A2, SLC16A3, SLC16A4, SLC16A5, |
| monocarboxylate | SLC16A6, SLC16A7, SLC16A8, SLC16A9, SLC16A10, |
| transporter family | SLC16A11, SLC16A12, SLC16A13, SLC16A14 |
| SLC17: The vesicular | SLC17A1, SLC17A2, SLC17A3, SLC17A4, SLC17A5, |
| glutamate transporter | SLC17A6, SLC17A7, SLC17A8 |
| family | |
| SLC18: The vesicular | SLC18A1, SLC18A2, SLC18A3 |
| amine transporter family | |
| SLC19: The | SLC19A1, SLC19A2, SLC19A3 |
| folate/thiamine | |
| transporter family | |
| SLC20: The type III | SLC20A1, SLC20A2 |
| Na+-phosphate | |
| cotransporter family | |
| SLC21/SLCO: The | subfamily 1; SLCO1A2, SLCO1B1, SLCO1B3, SLCO1B4, |
| organic anion | SLCO1C1 |
| transporting family | subfamily 2; SLCO2A1, SLCO2B1 |
| | subfamily 3; SLCO3A1 |
| | subfamily 4; SLCO4A1, SLCO4C1 |
| | subfamily 5; SLCO5A1 |
| SLC22: The organic | SLC22A1, SLC22A2, SLC22A3, SLC22A4, SLC22A5, |
| cation/anion/zwitterion | SLC22A6, SLC22A7, SLC22A8, SLC22A9, SLC22A10, |
| transporter family | SLC22A11, SLC22A12, SLC22A13, SLC22A14, SLC22A15, |
| | SLC22A16, SLC22A17, SLC22A18, SLC22A19, SLC22A20 |
| SLC23: The Na+- | SLC23A1, SLC23A2, SLC23A3, SLC23A4 |
| dependent ascorbic acid | |
| transporter family | |
| SLC24: The Na+/(Ca2+- | SLC24A1, SLC24A2, SLC24A3, SLC24A4, SLC24A5, |
| K+) exchanger family | SLC24A6 |
| SLC25: The | SLC25A1, SLC25A2, SLC25A3, SLC25A4, SLC25A5, |
| mitochondrial carrier | SLC25A6, SLC25A7, SLC25A8, SLC25A9, SLC25A10, |
| family | SLC25A11, SLC25A12, SLC25A13, SLC25A14, SLC25A15, |
| | SLC25A16, SLC25A17, SLC25A18, SLC25A19, SLC25A20, |
| | SLC25A21, SLC25A22, SLC25A23, SLC25A24, SLC25A25, |
| | SLC25A26, SLC25A27, SLC25A28, SLC25A29, SLC25A30, |
| | SLC25A31, SLC25A32, SLC25A33, SLC25A34, SLC25A35, |
| | SLC25A36, SLC25A37, SLC25A38, SLC25A39, SLC25A40, |
| | SLC25A41, SLC25A42, SLC25A43, SLC25A44, SLC25A45, |
| | SLC25A46 |
| SLC26: The | SLC26A1, SLC26A2, SLC26A3, SLC26A4, SLC26A5, |
| multifunctional anion | SLC26A6, SLC26A7, SLC26A8, SLC26A9, SLC26A10, |
| exchanger family | SLC26A11 |
| SLC27: The fatty acid | SLC27A1, SLC27A2, SLC27A3, SLC27A4, SLC27A5, |
| transport protein family | SLC27A6 |
| SLC28: The Na+- | SLC28A1, SLC28A2, SLC28A3 |
| coupled nucleoside | |
| transport family | |
| SLC29: The facilitative | SLC29A1, SLC29A2, SLC29A3, SLC29A4 |
| nucleoside transporter | |
| family | |
| SLC30: The zinc efflux | SLC30A1, SLC30A2, SLC30A3, SLC30A4, SLC30A5, |
| family | SLC30A6, SLC30A7, SLC30A8, SLC30A9, SLC30A10 |
| SLC31: The copper | SLC31A1 |
| transporter family | |
| SLC32: The vesicular | SLC32A1 |
| inhibitory amino acid | |
| transporter family | |
| SLC33: The Acetyl-CoA | SLC33A1 |
| transporter family | |
| SLC34: The type II Na+- | SLC34A1, SLC34A2, SLC34A3 |
| phosphate cotransporter | |
| family | |
| SLC35: The nucleoside- | subfamily A; SLC35A1, SLC35A2, SLC35A3, SLC35A4, |
| sugar transporter family | SLC35A5 |
| | subfamily B; SLC35B1, SLC35B2, SLC35B3, SLC35B4 |
| | subfamily C; SLC35C1, SLC35C2 |
| | subfamily D; SLC35D1, SLC35D2, SLC35D3 |
| | subfamily E; SLC35E1, SLC35E2, SLC35E3, SLC35E4 |
| SLC36: The proton- | SLC36A1, SLC36A2, SLC36A3, SLC36A4 |
| coupled amino acid | |
| transporter family | |
| SLC37: The sugar- | SLC37A1, SLC37A2, SLC37A3, SLC37A4 |
| phosphate/phosphate | |
| exchanger family | |
| SLC38: The System A & | SLC38A1, SLC38A2, SLC38A3, SLC38A4, SLC38A5, |
| N, sodium-coupled | SLC38A6 |
| neutral amino acid | |
| transporter family | |
| SLC39: The metal ion | SLC39A1, SLC39A2, SLC39A3, SLC39A4, SLC39A5, |
| transporter family | SLC39A6, SLC39A7, SLC39A8, SLC39A9, SLC39A10, |
| | SLC39A11, SLC39A12, SLC39A13, SLC39A14 |
| SLC40: The basolateral | SLC40A1 |
| iron transporter family | |
| SLC41: The MgtE-like | SLC41A1, SLC41A2, SLC41A3 |
| magnesium transporter | |
| family | |
| SLC42: The Rh | RhAG, RhBG, RhCG |
| ammonium transporter | |
| family (pending) | |
| SLC43: Na+- | SLC43A1, SLC43A2, SLC43A3 |
| independent, system-L | |
| like amino acid | |
| transporter family | |
| SLC44: Choline-like | SLC44A1, SLC44A2, SLC44A3, SLC44A4, SLC44A5 |
| transporter family | |
| SLC45: Putative sugar | SLC45A1, SLC45A2, SLC54A3, SLC45A4 |
| transporter family | |
| SLC46: Heme transporter | SLC46A1, SLC46A2 |
| family | |
| SLC47: Multidrug and | SLC47A1, SLC47A2 |
| toxin extrusion | |

[0424] The viruses for use in the methods provided herein also can encode proteins, such as transporter proteins (e.g., the human norepinephrine transporter (hNET) and the human sodium iodide symporter (hNIS)), which can provide increase uptake diagnostic and therapeutic moieties across the cell membrane of infected cells for therapy, imaging or detection (see, e.g. U.S. Patent Pub. No. 2009-0117034). The sodium-iodide symporter (NIS) is an ion pump that transports iodide (I⁻) into thyroid epithelial cells across the basolateral plasma membrane, an important step in the process of iodide organification and the formation of triiodothyronine (T₃) and thyroxine (T₄). sNIS also is referred to as the “Sodium/iodide cotransporter,” “Na(+)/I(−) cotransporter,” “SLC5A5,” “TC 2.A.21.5.1” and “solute carrier family 5 member 5.” In addition, these proteins, when expressed in tumor cells, can provide a target for capture of the tumor cells, such as by an antibody that specifically binds to an epitope of the protein that is expressed on the surface of the tumor cells.

### (6) Proteins Detectable by Antibodies

[0425] Viruses also can be modified to express a heterologous reporter protein that can be detected with antibodies, typically by indirect or direct Enzyme Linked ImmunoSorbent Assay (ELISA). Any protein or epitope thereof against which an antibody can be can be raised can be employed for these purposes. For example, as a non-radioactive alternative, chloramphenicol acetyltransferase expression can be quantified in an ELISA via immunological detection of the CAT enzyme expressed in the virus (see e.g., Francois et al. (2005) Antimicrob. Agents Chemother. 49:3770-3775). In another example, the well-defined human Growth Hormone (hGH) reporter system can be utilized. When cloned into the viruses and expressed in the infected host cell, the hGH reporter protein can be secreted into the culture medium, which means that cell lysis is not necessary for quantifying the reporter protein. Detection of the secreted hGH can be carried out, for example, using ¹²⁵I-labeled antibodies against the growth hormone or with anti-hGH antibodies bound to the surface of a microtiter plate. For example, the hGH from the supernatant of the culture medium is added to the wells and binds to the antibody on the plate. The bound hGH can be detected in two steps via a digoxigenin-coupled anti-hGH antibody and a peroxidase-coupled anti-digoxigenin antibody. Bound peroxidase can then be quantified by incubation with a substrate.

### (7) Fusion Proteins

[0426] The viruses also can be modified to express reporter proteins that are fusion proteins, encoded by fusion genes. The fusion protein can contain all or part of an endogenous viral protein, or contain only heterologous amino acids sequences. The fusion protein can contain a polypeptide, protein or fragment thereof that is itself detectable, such as by spectrometry, fluorescence, chemiluminescence, or any other method known in the art, or catalyzes a detectable reaction or some visible change in the host cells or their environment upon addition of the appropriate substrate, or binds a detectable product. In one example, the fusion gene is a fusion of two individual genes that are required for a fully functional dateable product. For example, the luxA and luxB genes of bacterial luciferase can be fused to produce the fusion gene (Fab2), which can be expressed to produce a fully functional luciferase protein, as described above. In another example, the fusion protein can contain more than one detectable element. For example, a fluorescent protein, such as GFP, can be expressed as a fusion protein with a bioluminescent protein, such as luciferase, or another fluorescent protein that differs in the wavelength of light emitted, such as DsRed. In another non-limiting example, an enzyme, such as β-galactosidase, can be expressed as a fusion protein with a protein or polypeptide detectable by antibodies, such as hGH.

### (8) Proteins that Interact with Host Cell Proteins

[0427] The viruses also can be modified to express a reporter protein that directly interacts with one or more proteins that are expressed in the host cell. This interaction can result in a detectable change in the reporter protein such that the interaction can be measured. If the host cell proteins(s) are expressed during a particular biological process, then the reporter protein can be used to indicate the initiation of this process. In some examples, the reporter protein can be a substrate of a host cell protease. Once cleaved, one or more of the separate cleaved products can be differentially detected over the uncleaved protein. In one example, the virus can be modified to express a protein that contains a caspase target sequence, such as LEVD (SEQ ID NO:55) or DEVD (SEQ ID NO:56). For example, a reporter virus can be modified to express a fusion protein that contains a caspase target sequence that is flanked by two fluorescent molecules, such as CFP and YFP. Cleavage of the fusion protein results in fluorescent signals that can be differentiated from the uncleaved protein by fluorescence resonance energy transfer (FRET) analysis. FRET is a distance-dependent interaction between the electronic excited states of two dye molecules in which excitation is transferred from a donor molecule to an acceptor molecule without emission of a photon. When two suitable fluorescent molecules are separated by a sufficiently short distance, FRET will occur and observed emission at the wavelength corresponding to the donor will increase. When the molecules are separated further, FRET decreases (Zaccolo et al. (2004) Circ. Res. 94:866-873). The uncleaved fusion protein results in intense FRET, but when caspases are activated in the target cell during apoptosis, the fusion protein is cleaved and the molecules are separated, so FRET diminishes (He et al. (2004) Am. J. Pathol. 164:1901-1913). In other examples, a fusion protein is made of a luciferase and a fluorophore, linked by a cleavage sequence, and cleavage is detected by bioluminescence resonance energy transfer (BRET) analysis (Hu et al. (2005) J. Virol. Methods 128:93-103).

### ii. Operable Linkage to Promoter

[0428] The heterologous nucleic acid sequences encoding a reporter protein can be expressed in the viruses by being operably linked to a promoter. The heterologous nucleic acid can be operatively linked to a native promoter or a heterologous (with respect to the virus) promoter. Any promoter known to initiate transcription of an operably-linked open reading frame can be used. The choice of promoter can, however, affect the timing (in relation to viral infection and replication) and the level of the expression of the reporter gene. In some instances, certain requirements exist when operably linking heterologous nucleic acid to the promoter to ensure optimal expression. For example, when a reporter gene is operably linked to a promoter for expression in vaccinia viruses, the heterologous nucleic acid typically does not contain any intervening sequences, such as introns, as the virus does not splice its transcripts. Methods and parameters for operably linking heterologous nucleic acids sequences to promoters for successful expression are well known in the art (see, e.g., U.S. Pat. Nos. 4,769,330, 4,603,112, 4,722,848, 4,215,051, 5,110,587, 5,174,993, 5,922,576, 6,319,703, 5,719,054, 6,429,001, 6,589,531, 6,573,090, 6,800,288, 7,045,313; He et al. (1998) Proc. Natl. Acad. Sci. USA 95(5):2509-2514; Racaniello et al. (1981) Science 214:916-919; Hruby et al. (1990) Clin Micro Rev. 3:153-170).

### (1) Promoter Characteristics

[0429] The heterologous nucleic acid can be operatively linked to a native promoter or a heterologous (with respect to the virus) promoter. Any suitable promoters, including synthetic and naturally-occurring and modified promoters, can be used. The promoter region includes specific sequences that are involved in polymerase recognition, binding and transcription initiation. These sequences can be cis acting or can be responsive to trans acting factors. Promoters, depending upon the nature of the regulation, can be constitutive or regulated. Regulated promoters can be inducible or environmentally responsive (e.g., respond to cues such as pH, anaerobic conditions, osmoticum, temperature, light, or cell density). Inducible promoters can include, but are not limited to, a tetracycline-repressed regulated system, ecdysone-regulated system, and rapamycin-regulated system (Agha-Mohammadi and Lotze (2000) J. Clin. Invest. 105(9): 1177-1183). Many promoter sequences are known in the art. See, for example, U.S. Pat. Nos. 4,980,285; 5,631,150; 5,707,928; 5,759,828; 5,888,783; 5,919,670, and, Sambrook, et al. Molecular Cloning: A Laboratory Manual, 2nd Ed., Cold Spring Harbor Press (1989). Synthetic promoters also can be generated. Specific cis elements that can function to modulate a minimal promoter, such as one that contains only a TATA box and an initiator sequence, can be identified and used to generate a promoter that is optimized for the intended use (Edelman et al. (2000) Proc. Natl. Acad. Sci. USA 97:3038-3043). Synthetic promoters for the expression of proteins in vaccinia virus are known in the art, and can include various regulatory elements that dictate the expression profile of the protein (such as the stage in the viral life cycle at which the protein is expressed), and/or enhance expression (see e.g., Pfleiderer et al. (1995) J Gen Virol. 76:2957-2962, Hammond et al. (1997) J Virol Methods. 66:135-138, Chakrabarti et al. (1997) BioTechniques 23:1094-1097). Synthetic promoters also include chemically synthesized promoters, such as those described in U.S. Pat. Pub. No. 2004/0171573.

[0430] Promoters that are responsive to external factors, either directly or indirectly, can be selected for use. External factors can include, for example, drugs and inhibitors, such as chemotherapeutic drugs. In one example, the heterologous nucleic acid, such as that which encodes a reporter protein, is operably linked to a promoter that is sensitive to one or more chemotherapeutic drugs. That is, the expression of the heterologous protein from the promoter is inhibited by the chemotherapeutic agent. In another example, the heterologous nucleic acid, such as that which encodes a reporter protein, is operably linked to a promoter that is resistant to one or more chemotherapeutic drugs. That is, the expression of the heterologous protein from the promoter is unaffected by the chemotherapeutic agent. Such a promoter can be of any origin, including mammalian or viral, and be natural or synthetic.

[0431] Promoters also can be selected for use on the basis of the relative expression levels that they initiate. Strong promoters are those that support a relatively high level of expression, while weak promoters are those that support a relatively low level of expression. For example, the vaccinia virus synthetic early/late and late promoters are relatively strong promoters, whereas vaccinia synthetic early, P7.5k early/late, P7.5k early, and P28 late promoters are relatively weaker promoters (see e.g., Chakrabarti et al. (1997) BioTechniques 23(6):1094-1097).

### (a) Viral and Host Factors

[0432] Expression of heterologous proteins can be influenced by one or more proteins or molecules expressed by the virus, or one or more factors expressed by the host. For example, various viral transcription factors can bind other proteins or to the promoter sequence to initiate transcription, or various host factors can interact with one or more regions in the promoter sequence, or with one or more other factors, to initiate transcription. The expression or availability of these molecules and proteins can dictate, for example, level of expression, or the timing of expression, of the heterologous protein under the control of the promoter with which the factors interact.

[0433] In one example, the expression of a heterologous protein, such as a reporter protein, from a virus can be controlled temporally by using a promoter that requires interaction with one or more host or viral factors that are expressed, or are available, at a particular stage of the viral life cycle, to initiate transcription. Vaccinia virus coordinates its progression through its replicative cycle by expressing individual proteins at specific times. The temporal regulation of gene expression is controlled at the level of transcriptional initiation, and occurs through a cascade. The transcription factors required for intermediate genes are expressed as early proteins, factors required for late genes are intermediate gene products and the late genes products are packaged into the virions and act as transcription factors for early genes. For example, the vaccinia virus early transcription factor (ETF), which is a dimer made from the products of two late genes, interacts with two regions of the early promoters and recruits the RNA polymerase to the site of transcription. Initiation of transcription results in the synthesis of the early genes within minutes of viral entry into the cell, and is independent of de novo protein synthesis because ETF and the RNA polymerase are already present in the virion. In some instances, genes are expressed continuously, which can be achieved by a tandem arrangement of early and intermediate or late promoters operably linked to the open reading frame (Broyles et al. (1986) Proc. Natl. Acad. Sci. USA 83:3141-3145, Ahn et al. (1990) Mol Cell Biol. 10:5433-5441).

[0434] Nearly all viruses, including, but not limited to, poxviruses (including vaccinia virus), adenoviruses, herpesviruses, flaviviruses and caliciviruses link the switch from early to late gene expression to genome replication. The intermediate genes are expressed immediately post-replication, followed closely thereafter by transcription of the late genes. In the absence of nucleic acid synthesis, transcriptional switch does not occur. Because of this regulated expression, inhibition of genome synthesis by, for example, the addition of inhibitors of nucleic acid synthesis such as cytosine arabinoside (Ara-C), results in the inhibition of intermediate and late gene transcription (Vos et al. (1988) EMBO J. 7:3487-3492, Kao et al. (1987) Virology 159:399-407). Therefore, operably linking a heterologous gene to a viral intermediate or late promoter links its expression in the virally-infected host to certain stages of the viral life cycle i.e., after DNA replication. In contrast, operably linking a heterologous gene to a viral early promoter results in its expression immediately following viral entry into the host cell. By selecting the appropriate promoter, a reporter protein can therefore be used to reflect transcriptional activity at various stages of the viral life cycle, which can be linked to multiple viral and/or host factors, and/or external factors, such as drugs and inhibitors.

### (b) Exemplary Promoters

[0435] Exemplary promoters include synthetic promoters, including synthetic viral and animal promoters. Native promoters or heterologous promoters include, but are not limited to, viral promoters, such as vaccinia virus and adenovirus promoters. Vaccinia viral promoters can be synthetic or natural promoters, and include vaccinia early, intermediate, early/late and late promoters. Exemplary vaccinia viral promoters for use in the methods can include, but are not limited to, P7.5k, P11k, PSL, PSEL, PSE, HSR, TK, P28, C11R, G8R, F17R, I3L, I8R, A1L, A2L, A3L, H1L, H3L, H5L, H6R, H8R, D1R, D4R, D5R, D9R, D11L, D12L, D13L, M1L, N2L, P4b or K1 promoters. Other viral promoters can include, but are not limited to, adenovirus late promoter, Cowpox ATI promoter, T7 promoter, adenovirus late promoter, adenovirus E1A promoter, SV40 promoter, cytomegalovirus (CMV) promoter, thymidine kinase (TK) promoter, or Hydroxymethyl-Glutaryl Coenzyme A (HMG) promoter.

[0436] In some examples, it can be desirable to choose promoters that initiate expression at particular time points in the viral life cycle. An exemplary vaccinia early promoter is a synthetic early promoter (PSE), which typically initiates gene expression from 0-3 hours post infection. Exemplary vaccinia late promoters include, but are not limited to, a vaccinia 11k promoter (P11k) and a synthetic late promoter (PSL), which typically initiate gene expression 2-3 hours post-infection. Exemplary promoters in vaccinia virus that are expressed throughout the life cycle include tandem arrangements of vaccinia early and intermediate or late promoters (see e.g., Wittek et al. (1980) Cell 21: 487-493; Broyles and Moss (1986) Proc. Natl. Acad. Sci. USA 83:3141-3145; Ahn et al. (1990) Mol. Cell. Biol. 10: 5433-54441; Broyles and Pennington (1990) J. Virol. 64:5376-5382). Exemplary vaccinia early/late promoters that express throughout the vaccinia life cycle include, but are not limited to, a 7.5K promoter (P7.5k) and a synthetic early/late promoter (PSEL).

[0437] In some examples, it can be desirable to choose a promoter of a particular relative strength. For example, in vaccinia, synthetic early/late PSEL and many late promoters (e.g., P11k and PSL) are relatively strong promoters, whereas vaccinia synthetic early, PSE, P7.5k early/late, P7.5k early, and P28 late promoters are relatively weak promoters (see e.g., Chakrabarti et al. (1997) BioTechniques 23(6):1094-1097).

### iii. Expression of Multiple Reporter Proteins

[0438] A virus used in the methods provided herein can be modified to express two or more gene products that emit a detectable signal, catalyze a detectable reaction, bind a detectable compound, form a detectable product, or any combination thereof. Any combination of such gene products can be expressed by the viruses for use in the methods provided herein. Detection of the gene products, or reporter proteins, can be effected by, for example, spectrometry, fluorescence, chemiluminescence, MRI, PET, histology or any other method known in the art. A virus expressing two or more detectable gene products can be imaged in vitro or in vivo using such methods. In certain examples, the virus can express the two or more reporter proteins as a fusion protein, such as described above. For example, a virus can be modified to express a fusion protein containing two fluorescent proteins that differ in the wavelength of light emitted, such as GFP and DsRed. In certain examples the two or more gene products are expressed as individual transcripts, from separate promoters. The promoters can be of the same type and sequence, or a different type and sequence. For example, two or more reporter genes can be transcribed separately from the same type of promoter, such as for example, the vaccinia P7.5k early/late promoter, at different locations in the virus genome. Alternately, the two or more reporter genes can be transcribed from different promoters. For example, a vaccinia virus can be modified to express the β-galactosidase gene (lacZ) under the control of the vaccinia P7.5 early/late promoter, and the gene for Katushka fluorescent protein under the control of the vaccinia PSE synthetic early promoter, PSEL synthetic early/late promoter, or PSL synthetic late promoter.

[0439] c. Further Modifications of the Viruses

[0440] The viruses used in the methods provided herein can be further modified. Such modifications can, for example, enhance the ease with which the methods are performed, reduce the time taken to perform the methods, provide conditions of increased safety or suitability for administration, compared to unmodified viruses. Such characteristics can include, but are not limited to, attenuated pathogenicity, reduced toxicity, increased or decreased replication competence, increased, decreased or otherwise altered tropism, increased or decreased sensitivity to drugs, such as nucleoside analogs and any combination thereof. The viruses used in the methods provided herein can be modified by any known method for modifying a virus. For example, the viruses can be modified to express one or more heterologous genes. The heterologous genes can be expressed under the control of endogenous viral promoters, or exogenous (i.e., heterologous to the virus) promoters, including synthetic promoters.

[0441] Oncolytic viruses have been genetically altered to attenuate their virulence, to improve their safety profile, enhance their tumor specificity, and they have also been equipped with additional genes, for example cytotoxins, cytokines, prodrug converting enzymes to improve the overall efficacy of the viruses (see, e.g., Kim et al., (2009) Nat Rev Cancer 9:64-71; Garcia-Aragoncillo et al., (2010) Curr Opin Mol Ther 12:403-411; see U.S. Pat. Nos. 7,588,767, 7,588,771, 7,662,398 and 7,754,221 and U.S. Pat. Publ. Nos. 2007/0202572, 2007/0212727, 2010/0062016, 2009/0098529, 2009/0053244, 2009/0155287, 2009/0117034, 2010/0233078, 2009/0162288, 2010/0196325, 2009/0136917 and 2011/0064650).

[0442] The modifications can be effected by any method known in the art, and can be introduced into the virus before, after, simultaneously, or in the absence of, the introduction one or more reporter genes. In certain examples, the virus is modified to attenuate pathogenicity. In some examples, it can be desirable to generate a more attenuated virus. A more attenuated virus can be more suitable for in vivo administration and in in vitro assays, providing a safer environment for laboratory personnel and reducing the laboratory biosafety requirements. Attenuation of the virus can be effected by modification of one or more viral genes, such as by a point mutation, a deletion mutation, an interruption by an insertion, a substitution or a mutation of the viral gene promoter or enhancer regions. In such instances, it is advantageous to first identify a target gene involved in pathogenicity, although random mutagenesis can result in attenuation of the virus. The target genes also are typically non-essential, such that the ability of the virus to propagate without the need of a packaging cell lines is preserved when the genes are not expressed, or expressed at decreased levels. In viruses such as vaccinia virus, mutations in non-essential genes, such as the thymidine kinase (TK) gene or hemagglutinin (HA) gene have been employed to attenuate the virus (e.g., Buller et al. (1985) Nature 317:813-815, Shida et al. (1988) J. Virol. 62(12):4474-4480, Taylor et al. (1991) J. Gen. Virol. 72 (Pt 1):125-30, U.S. Pat. Nos. 5,364,773, 6,265,189 and 7,045,313). The inactivation of these genes decreases the overall pathogenicity of the virus without eliminating the ability of the viruses to replicate in certain cell types.

[0443] Attenuation also can be effected without eliminating or reducing the expression of one or more particular genes involved in pathogenicity. For example, increasing the number of genes that the virus expresses can cause competition for viral transcription and/or translation factors, which can result in changes in expression of endogenous viral genes. Such changes can affect viral processes involved in viral replication, thus contributing to the attenuation of the virus. For example, viral processes, such as viral nucleic acid replication, transcription of other viral genes, viral mRNA production, viral protein synthesis, or virus particle assembly and maturation, can be affected. Insertion of gene expression cassettes that require binding of host factors for efficient transcription can be used to compete the transcription and/or translation factors away from the endogenous viral promoters and transcripts. For example, insertion of gene expression cassettes that contain vaccinia strong late promoters into vaccinia virus can be used to attenuate expression of endogenous vaccinia late genes.

[0444] Viruses provided herein also can contain a modification that alters its infectivity or resistance to neutralizing antibodies. In one non-limiting example deletion of the A35R gene in an vaccinia LIVP strain can decrease the infectivity of the virus. In some examples, the viruses provided herein can be modified to contain a deletion of the A35R gene. Exemplary methods for generating such viruses are described in PCT Publication No. WO2008/100292, which describes vaccinia LIVP viruses GLV-1j87, GLV-1j88 and GLV-1j89, which contain deletion of the A35R gene.

[0445] In another non-limiting example, replacement of viral coat proteins (e.g., A34R, which encodes a viral coat glycoprotein) with coat proteins from either more virulent or less virulent virus strains can increase or decrease the clearance of the virus from the subject. In one example, the A34R gene in an vaccinia LIVP strain can be replaced with the A34R gene from vaccinia IHD-J strain. Such replacement can increase the extracellular enveloped virus (EEV) form of vaccinia virus and can increase the resistance of the virus to neutralizing antibodies.

### i. Expression of a Therapeutic Gene Product

[0446] In some examples provided herein, oncolytic reporter viruses can be administered to a subject for diagnosis and therapy of tumors, metastases and CTCs. In some examples, the oncolytic viruses provide oncolytic therapy of a tumor cell without the expression of a therapeutic gene. In other examples, the oncolytic reporter viruses can express one or more genes whose products are useful for tumor therapy. For example, a virus can express proteins that cause cell death or whose products cause an anti-tumor immune response. Such genes can be considered therapeutic genes. A variety of therapeutic gene products, such as toxic or apoptotic proteins, or siRNA, are known in the art, and can be used with the viruses provided herein. The therapeutic genes can act by directly killing the host cell, for example, as a channel-forming or other lytic protein, or by triggering apoptosis, or by inhibiting essential cellular processes, or by triggering an immune response against the cell, or by interacting with a compound that has a similar effect, for example, by converting a less active compound to a cytotoxic compound.

[0447] Exemplary therapeutic gene products that can be expressed by the oncolytic reporter viruses include, but are not limited to, gene products (i.e., proteins and RNAs), including those useful for tumor therapy, such as, but not limited to, an anticancer agent, an anti-metastatic agent, or an antiangiogenic agent. For example, exemplary proteins useful for tumor therapy include, but are not limited to, tumor suppressors, cytostatic proteins and costimulatory molecules, such as a cytokine, a chemokine, or other immunomodulatory molecules, an anticancer antibody, such as a single-chain antibody, antisense RNA, siRNA, prodrug converting enzyme, a toxin, a mitosis inhibitor protein, an antitumor oligopeptide, an anticancer polypeptide antibiotic, an angiogenesis inhibitor, or tissue factor. For example, a large number of therapeutic proteins that can be expressed for tumor treatment in the viruses and methods provided herein are known in the art, including, but not limited to, a transporter, a cell-surface receptor, a cytokine, a chemokine, an apoptotic protein, a mitosis inhibitor protein, an antimitotic oligopeptide, an antiangiogenic factor (e.g., hk5), angiogenesis inhibitors (e.g., plasminogen kringle 5 domain, anti-vascular endothelial growth factor (VEGF) scAb, tTF-RGD, truncated human tissue factor-αᵥβ₃-integrin RGD peptide fusion protein), anticancer antibodies, such as a single-chain antibody (e.g., an antitumor antibody or an antiangiogenic antibody, such as an anti-VEGF antibody or an anti-epidermal growth factor receptor (EGFR) antibody), a toxin, a tumor antigen, a prodrug converting enzyme, a ribozyme, RNAi, and siRNA.

[0448] Additional therapeutic gene products that can be expressed by the oncolytic reporter viruses include, but are not limited to, cell matrix degradative genes, such as but not limited to, relaxin-1 and MMP9, and genes for tissue regeneration and reprogramming human somatic cells to pluripotency, such as but not limited to, nAG, Oct4, NANOS, Neogenin-1, Ngn3, Pdx1 and Mafa.

[0449] Costimulatory molecules for use in the methods provided herein include any molecules which are capable of enhancing immune responses to an antigen/pathogen in vivo and/or in vitro. Costimulatory molecules also encompass any molecules which promote the activation, proliferation, differentiation, maturation or maintenance of lymphocytes and/or other cells whose function is important or essential for immune responses.

[0450] An exemplary, non-limiting list of therapeutic proteins includes tumor growth suppressors such as IL-24, WT1, p53, pseudomonas A endotoxin, diphtheria toxin, Arf, Bax, HSV TK, E. coli purine nucleoside phosphorylase, angiostatin and endostatin, p16, Rb, BRCA1, cystic fibrosis transmembrane regulator (CFTR), Factor VIII, low density lipoprotein receptor, beta-galactosidase, alpha-galactosidase, beta-glucocerebrosidase, insulin, parathyroid hormone, alpha-1-antitrypsin, rsCD40L, Fas-ligand, TRAIL, TNF, antibodies, microcin E492, diphtheria toxin, Pseudomonas exotoxin, Escherichia coli Shiga toxin, Escherichia coli Verotoxin 1, and hyperforin. Exemplary cytokines include, but are not limited to, chemokines and classical cytokines, such as the interleukins, including, but not limited to, interleukin-1, interleukin-2, interleukin-6 and interleukin-12, tumor necrosis factors, such as tumor necrosis factor alpha (TNF-α), interferons such as interferon gamma (IFN-γ), granulocyte macrophage colony stimulating factor (GM-CSF), erythropoietin and exemplary chemokines including, but not limited to CXC chemokines such as IL-8 GROα, GROβ, GROγ, ENA-78, LDGF-PBP, GCP-2, PF4, Mig, IP-10, SDF-1α/β, BUNZO/STRC33, I-TAC, BLC/BCA-1; CC chemokines such as MIP-1α, MIP-1β, MDC, TECK, TARC, RANTES, HCC-1, HCC-4, DC-CK1, MIP-3α, MIP-3β, MCP-1, MCP-2, MCP-3, MCP-4, Eotaxin, Eotaxin-2/MPIF-2, I-309, MIP-5/HCC-2, MPIF-1, 6Ckine, CTACK, MEC; lymphotactin; and fractalkine. Exemplary other costimulatory molecules include immunoglobulin superfamily of cytokines, such as B7.1 and B7.2.

[0451] Exemplary therapeutic proteins that can be expressed by the oncolytic reporter viruses used in the methods provided herein include, but are not limited to, erythropoietin (e.g., SEQ ID NO:28), an anti-VEGF single chain antibody (e.g., SEQ ID NO:29), a plasminogen K5 domain (e.g., SEQ ID NO:30), a human tissue factor-αvβ3-integrin RGD fusion protein (e.g., SEQ ID NO:31), interleukin-24 (e.g., SEQ ID NO:32), or immune stimulators, such as IL-6-IL-6 receptor fusion protein (e.g., SEQ ID NO:33).

[0452] In some examples, the oncolytic reporter viruses used in the methods provided herein can express one or more therapeutic gene products that are proteins that convert a less active compound into a compound that causes tumor cell death. Exemplary methods of conversion of such a prodrug compound include enzymatic conversion and photolytic conversion. A large variety of protein/compound pairs are known in the art, and include, but are not limited to, Herpes simplex virus thymidine kinase/ganciclovir, Herpes simplex virus thymidine kinase/(E)-5-(2-bromovinyl)-2′-deoxyuridine (BVDU), varicella zoster thymidine kinase/ganciclovir, varicella zoster thymidine kinase/BVDU, varicella zoster thymidine kinase/(E)-5-(2-bromovinyl)-1-beta-D-arabinofuranosyluracil (BVaraU), cytosine deaminase/5-fluorouracil, cytosine deaminase/5-fluorocytosine, purine nucleoside phosphorylase/6-methylpurine deoxyriboside, beta lactamase/cephalosporin-doxorubicin, carboxypeptidase G2/4-[(2-chloroethyl)(2-mesyloxyethyl)amino]benzoyl-L-glutamic acid (CMDA), carboxypeptidase A/methotrexate-phenylamine, cytochrome P450/acetominophen, cytochrome P450-2B1/cyclophosphamide, cytochrome P450-4B1/2-aminoanthracene, 4-ipomeanol, horseradish peroxidase/indole-3-acetic acid, nitroreductase/CB1954, rabbit carboxylesterase/7-ethyl-10-[4-(1-piperidino)-1-piperidino]carbonyloxy-camptothecin (CPT-11), mushroom tyrosinase/bis-(2-chloroethyl)amino-4-hydroxyphenylaminomethanone 28, beta galactosidase/1-chloromethyl-5-hydroxy-1,2-dihydro-3H-benz[e]indole, beta glucuronidase/epirubicin glucuronide, thymidine phosphorylase/5′-deoxy-5-fluorouridine, deoxycytidine kinase/cytosine arabinoside, and linamerase/linamarin.

[0453] Other therapeutic gene products that can be expressed by the oncolytic reporter viruses used in the methods provided herein include siRNA and microRNA molecules. The siRNA and/or microRNA molecule can be directed against expression of a tumor-promoting gene, such as, but not limited to, an oncogene, growth factor, angiogenesis promoting gene, or a receptor. The siRNA and/or microRNA molecule also can be directed against expression of any gene essential for cell growth, cell replication or cell survival. The siRNA and/or microRNA molecule also can be directed against expression of any gene that stabilizes the cell membrane or otherwise limits the number of tumor cell antigens released from the tumor cell. Design of an siRNA or microRNA can be readily determined according to the selected target of the siRNA; methods of siRNA and microRNA design and down-regulation of genes are known in the art, as exemplified in U.S. Pat. Pub. Nos. 2003-0198627 and 2007-0044164, and Zeng et al., (2002) Molecular Cell 9:1327-1333.

[0454] Therapeutic gene products include viral attenuation factors, such as antiviral proteins. Antiviral proteins or peptides can be expressed by the viruses provided herein. Expression of antiviral proteins or peptides can control viral pathogenicity. Exemplary viral attenuation factors include, but are not limited to, virus-specific antibodies, mucins, thrombospondin, and soluble proteins such as cytokines, including, but not limited to TNFα, interferons (for example IFNα, IFNβ, or IFNγ) and interleukins (for example IL-1, IL-12 or IL-18).

[0455] Another exemplary therapeutic gene product that can be expressed by the oncolytic reporter viruses used in the methods provided herein is a protein ligand, such as antitumor oligopeptide. Antitumor oligopeptides are short protein peptides with high affinity and specificity to tumors. Such oligopeptides could be enriched and identified using tumor-associated phage libraries (Akita et al. (2006) Cancer Sci. 97(10):1075-1081). These oligopeptides have been shown to enhance chemotherapy (U.S. Pat. No. 4,912,199). The oligopeptides can be expressed by the viruses provided herein. Expression of the oligopeptides can elicit anticancer activities on their own or in combination with other chemotherapeutic agents. An exemplary group of antitumor oligopeptides is antimitotic peptides, including, but not limited to, tubulysin (Khalil et al. (2006) Chembiochem. 7(4):678-683), phomopsin, hemiasterlin, taltobulin (HTI-286, 3), and cryptophycin. Tubulysin is from myxobacteria and can induce depletion of cell microtubules and trigger the apoptotic process. The antimitotic peptides can be expressed by the viruses provide herein and elicit anticancer activities on their own or in combination with other therapeutic modalities.

[0456] Another exemplary therapeutic gene product that can be expressed by the oncolytic reporter viruses used in the methods provided herein is a protein that sequesters molecules or nutrients needed for tumor growth. For example, the virus can express one or more proteins that bind iron, transport iron, or store iron, or a combination thereof. Increased iron uptake and/or storage by expression of such proteins not only, increases contrast for visualization and detection of a tumor or tissue in which the virus accumulates, but also depletes iron from the tumor environment. Iron depletion from the tumor environment removes a vital nutrient from the tumors, thereby deregulating iron hemostasis in tumor cells and delaying tumor progression and/or killing the tumor.

[0457] Additionally, iron, or other labeled metals, can be administered to a tumor-bearing subject, either alone, or in a conjugated form. An iron conjugate can include, for example, iron conjugated to an imaging moiety or a therapeutic agent. In some cases, the imaging moiety and therapeutic agent are the same, e.g., a radionuclide. Internalization of iron in the tumor, wound, area of inflammation or infection allows the internalization of iron alone, a supplemental imaging moiety, or a therapeutic agent (which can deliver cytotoxicity specifically to tumor cells or deliver the therapeutic agent for treatment of the wound, area of inflammation or infection). These methods can be combined with any of the other methods provided herein.

[0458] In some examples, the oncolytic reporter viruses used in the methods provided herein can be modified to express one or more antigens to elicit antibody production against an expressed gene product and enhance the immune response against the infected tumor cell. The sustained release of antigen can result in an immune response by the viral-infected host, in which the host can develop antibodies against the antigen, and/or the host can mount an immune response against cells expressing the antigen, including an immune response against tumor cells. Thus, the sustained release of antigen can result in immunization against tumor cells. In some embodiments, the viral-mediated sustained antigen release-induced immune response against tumor cells can result in complete removal or killing of all tumor cells. The immunizing antigens can be endogenous to the virus, such as vaccinia antigens on a vaccinia virus used to immunize against smallpox, measles, mumps, or the immunizing antigens can be exogenous antigens expressed by the virus, such as influenza or HIV antigens expressed on a viral capsid surface. In the case of smallpox, for example, a tumor specific protein antigen can be carried by an attenuated vaccinia virus (encoded by the viral genome) for a smallpox vaccine. Thus, the viruses provided herein, including the modified vaccinia viruses can be used as vaccines.

[0459] As shown previously, solid tumors can be treated with viruses, such as vaccinia viruses, resulting in an enormous tumor-specific virus replication, which can lead to tumor protein antigen and viral protein production in the tumors (U.S. Patent Publication No. 2005/0031643). Vaccinia virus administration to mice resulted in lysis of the infected tumor cells and a resultant release of tumor-cell-specific antigens. Continuous leakage of these antigens into the body led to a very high level of antibody titer (in approximately 7-14 days) against tumor proteins, viral proteins, and the virus encoded engineered proteins in the mice. The newly synthesized anti-tumor antibodies and the enhanced macrophage, neutrophils count were continuously delivered via the vasculature to the tumor and thereby provided for the recruitment of an activated immune system against the tumor. The activated immune system then eliminated the foreign compounds of the tumor including the viral particles. This interconnected release of foreign antigens boosted antibody production and continuous response of the antibodies against the tumor proteins to function like an autoimmunizing vaccination system initiated by vaccinia viral infection and replication, followed by cell lysis, protein leakage and enhanced antibody production.

[0460] The administered virus can stimulate humoral and/or cellular immune response in the subject, such as the induction of cytotoxic T lymphocytes responses. For example, the virus can provide prophylactic and therapeutic effects against a tumor infected by the virus or other infectious diseases, by rejection of cells from tumors or lesions using viruses that express immunoreactive antigens (Earl et al., (1986) Science 234:728-831; Lathe et al., Nature London) 32: 878-880 (1987)), cellular tumor-associated antigens (Bernards et al., Proc. Natl. Acad. Sci. USA 84: 6854-6858 (1987); Estin et al., Proc. Natl. Acad. Sci. USA 85: 1052-1056 (1988); Kantor et al., J. Natl. Cancer Inst. 84: 1084-1091 (1992); Roth et al., Proc. Natl. Acad. Sci. USA 93: 4781-4786 (1996)) and/or cytokines (e.g., IL-2, IL-12), costimulatory molecules (B7-1, B7-2) (Rao et al., J. Immunol. 156:3357-3365 (1996); Chamberlain et al., Cancer Res. 56:2832-2836 (1996); Oertli et al., J. Gen. Virol. 77: 3121-3125 (1996); Qin and Chatterjee, Human Gene Ther. 7:1853-1860 (1996); McAneny et al., Ann. Surg. Oncol.3:495-500 (1996)), or other therapeutic proteins.

[0461] Exemplary heterologous genes for modification of viruses herein are known in the art (see e.g. U.S. Pub. Nos. 2003-0059400, 2003-0228261, 2009-0117034, 2009-0098529, 2009-0053244, 2009-0081639 and 2009-0136917; U.S. Pat. Nos. 7,588,767 and 7,763,420; and International Pub. No. WO 2009/139921). A non-limiting description of exemplary genes encoding heterologous proteins for modification of virus strains is set forth in the following table. The sequence of the gene and encoded proteins are known to one of skill in the art from the literature. Hence, provided herein are virus strains, including any of the clonal viruses provided herein, that contain nucleotides encoding any of the heterologous proteins listed in Table 5.

```
TABLE 5
Detectable gene products
  Optical Imaging
    Luciferase
      bacterial luciferase
      luciferase (from Vibrio harveyi or Vibrio fischerii)
        luxA
        luxB
        luxC
        luxD
        luxE
        luxAB
        luxCD
        luxABCDE
      firefly luciferase
      Renilla luciferase from Renilla renformis
      Gaussia luciferase
      luciferases found among marine arthropods
      luciferases that catalyze the oxidation of Cypridina (Vargula) luciferin
      luciferases that catalyze the oxidation of Coleoptera luciferin
luciferase photoproteins
      aequorin photoprotein to which luciferin is non-covalently bound
click beetle luciferase
      CBG99
      CBG99-mRFP1
Fusion Proteins
      Ruc-GFP
Fluorescent Proteins
GFP
      aequorin from Aequorea victoria
      GFP from Aequorea victoria
      GFP from Aequorea coerulescens
      GFP from the anthozoan coelenterates Renilla reniformis and Renilla kollikeri (sea
      pansies)
      Emerald (Initrogen, Carlsbad, CA)
      EGFP (Clontech, Palo Alto, CA)
      Azami-Green (MBL International, Woburn, MA)
      Kaede (MBL International, Woburn, MA)
      ZsGreen1 (Clontech, Palo Alto, CA)
      CopGFP (Evrogen/Axxora, LLC, San Diego, CA)
      Anthozoa reef coral
      Anemonia sea anemone
      Renilla sea pansy
      Galaxea coral
      Acropora brown coral
      Trachyphyllia stony coral
      Pectiniidae stony coral
      GFP-like proteins
RFP
      RFP from the corallimorph Discosoma (DsRed) (Matz et al. (1999) Nature
      Biotechnology 17: 969-973)
      Heteractis reef coral, Actinia or Entacmaea sea anemone
      RFPs from Discosoma variants
          mRFP1 (Wang et al. (2004) Proc. Natl. Acad. Sci. U.S.A. 101: 16745-9)
          mCherry (Wang et al. (2004) PNAS USA. 101(48): 16745-9)
          tdTomato (Wang et al. (2004) PNAS USA. 101(48): 16745-9)
          mStrawberry (Wang et al. (2004) PNAS USA. 101(48): 16745-9)
          mTangerine (Wang et al. (2004) PNAS USA. 101(48): 16745-9)
          DsRed2 (Clontech, Palo Alto, CA)
          DsRed-T1 (Bevis and Glick (2002) Nat. Biotechnol. 20: 83-87)
          Anthomedusa J-Red (Evrogen)
          Anemonia AsRed2 (Clontech, Palo Alto, CA)
far-red fluorescent protein
      TurboFP635
      mNeptune monomeric far-red fluorescent protein
      Actinia AQ143 (Shkrob et al. (2005) Biochem J. 392(Pt 3): 649-54)
      Entacmaea eqFP611 (Wiedenmann et al. (2002) PNAS USA. 99(18): 11646-5I)
      Discosoma variants
          mPlum (Wang et al.. (2004) PNAS USA. 101(48): 16745-9)
          mRasberry (Wang et al. (2004) PNAS USA. 101(48): 16745-9)
          Heteractis HcRed1 and t-HcRed (Clontech, Palo Alto, CA)
IFP (infrared fluorescent protein)
near-infrared fluorescent protein
YFP
      EYFP (Clontech, Palo Alto, CA)
      YPet (Nguyen and Daugherty (2005) Nat Biotechnol. 23(3): 355-60)
      Venus (Nagai et al. (2002) Nat. Biotechnol. 20(1): 87-90)
      ZsYellow (Clontech, Palo Alto, CA)
      mCitrine (Wang et al. (2004) PNAS USA. 101(48): 16745-9)
OFP
      cOFP (Strategene, La Jolla, CA)
      mKO (MBL International, Woburn, MA)
      mOrange (Wang et al.. (2004) PNAS USA. 101(48): 16745-9)
CFP
      Cerulean (Rizzo (2004) Nat Biotechnol. 22(4): 445-9)
      mCFP (Wang et al. (2004) PNAS USA. 101(48): 16745-9)
      AmCyan1 (Clontech, Palo Alto, CA)
      MiCy (MBL International, Woburn, MA)
      CyPet (Nguyen and Daugherty (2005) Nat Biotechnol. 23(3): 355-60)
BFP
      EBFP (Clontech, Palo Alto, CA);
      phycobiliproteins from certain cyanobacteria and eukaryotic algae, phycoerythrins
      (red) and the phycocyanins (blue)
R-Phycoerythrin (R-PE)
B-Phycoerythrin (B-PE)
Y-Phycoerythrin (Y-PE
C-Phycocyanin (P-PC)
R-Phycocyanin (R-PC)
Phycoerythrin 566 (PE 566)
Phycoerythrocyanin (PEC)
Allophycocyanin (APC)
frp Flavin Reductase
CBP Coelenterazine-binding protein 1
PET imaging
      Cyp11B1 transcript variant 1
      Cyp11B1 transcript variant 2
      Cyp11B2
      AlstR
      PEPR-1
      LAT-4 (SLC43A2)
      Cyp51 transcript variant 1
      Cyp51 transcript variant 2
Transporter proteins
Solute carrier transporter protein families (SLC)
      SLC1 solute carrier 1 transporter protein family
      SLC1A1, SLC1A2, SLC1A3, SLC1A4, SLC1A5, SLC1A6, SLC1A7
      SLC2 solute carrier 2 transporter protein family
      SLC2A1, SLC2A2, SLC2A3, SLC2A4, SLC2A5, SLC2A6, SLC2A7, SLC2A8,
      SLC2A9, SLC2A10, SLC2A11, SLC2A12, SLC2A13, SLC2A14)
      SLC3 solute carrier 3 transporter protein family
      SLC3A1, SLC3A2
      SLC 4 solute carrier 4 transporter protein family
      SLC4A1, SLC4A2, SLC4A3, SLC4A4, SLC4A5, SLC4A6, SLC4A7, SLC4A8,
      SLC4A9, SLC4A10, SLC4A11
      SLC5 solute carrier 5 transporter protein family
      SLC5A1 sodium/glucose cotransporter 1
      SLC5A2 sodium/glucose cotransporter 2
      SLC5A3 sodium/myo-inositol cotransporter
      SLC5A4 low affinity sodium-glucose cotransporter
      SLC5A5 sodium/iodide cotransporter
      SLC5A6 sodium-dependent multivitamin transporter
      SLC5A7 high affinity choline transporter 1
      SLC5A8 sodium-coupled monocarboxylate transporter 1
      SLC5A9 sodium/glucose cotransporter 4
      SLC5A10 sodium/glucose cotransporter 5, isoform 1
      sodium/glucose cotransporter 5, isoform 2
      sodium/glucose cotransporter 5, isoform 3
      sodium/glucose cotransporter 5, isoform 4
      SLC5A11 sodium/myo-inositol cotransporter 2, isoform 1
      sodium/myo-inositol cotransporter 2, isoform 2
      sodium/myo-inositol cotransporter 2, isoform 3
      sodium/myo-inositol cotransporter 2, isoform 4
      SLC5A12 sodium-coupled monocarboxylate transporter 2, isoform 1
      sodium-coupled monocarboxylate transporter 2, isoform 2
          Sodium Iodide Symporter (NIS)
          hNIS (NM_000453)
          hNIS (BC105049)
          hNIS (BC105047)
          hNIS (non-functional hNIS variant containing an additional 11 aa)
      SLC6 solute carrier 6 transporter protein family
      SLC6A1 sodium- and chloride-dependent GABA transporter 1
      SLC6A2 norepinephrine transporter (sodium-dependent noradrenaline transporter)
      SLC6A3 sodium-dependent dopamine transporter
      SLC6A4 sodium-dependent serotonin transporter
      SLC6A5 sodium- and chloride-dependent glycine transporter 1
      SLC6A6 sodium-and chloride-dependent taurine transporter
      SLC6A7 sodium-dependent proline transporter
      SLC6A8 sodium- and chloride-dependent creatine transporter
      SLC6A9 sodium- and chloride-dependent glycine transporter 1, isoform 1
      sodium- and chloride-dependent glycine transporter 1, isoform 2
      sodium- and chloride-dependent glycine transporter 1, isoform 3
      SLC6A10 sodium- and chloride-dependent creatine transporter 2
      SLC6A11 sodium- and chloride-dependent GABA transporter 3
      SLC6A12 sodium- and chloride-dependent betaine transporter
      SLC6A13 sodium- and chloride-dependent GABA transporter 2
      SLC6A14 Sodium- and chloride-dependent neutral and basic amino acid transporter
      B(0+)
      SLC6A15 Orphan sodium- and chloride-dependent neurotransmitter transporter
      NTT73
      SLC6A16 Orphan sodium- and chloride-dependent neurotransmitter transporter
      NTT5
      SLC6A17 Orphan sodium- and chloride-dependent neurotransmitter transporter
      NTT4
      Sodium SLC6A18 Sodium- and chloride-dependent transporter XTRP2
      SLC6A19 Sodium-dependent neutral amino acid transporter B(0)
      SLC6A20 Sodium- and chloride-dependent transporter XTRP3
      Norepinephrine Transporter (NET)
          Human Net (hNET) transcript variant 1 (NM_001172504)
          Human Net (hNET) transcript variant 2 (NM_001172501)
          Human Net (hNET) transcript variant 3 (NM_001043)
          Human Net (hNET) transcript variant 4 (NM_001172502)
          Non-Human Net
      SLC7 solute carrier 7 transporter protein family
      SLC7A1, SLC7A2, SLC7A3, SLC7A4, SLC7A5, SLC7A6, SLC7A7, SLC7A8,
      SLC7A9, SLC7A10, SLC7A11, SLC7A13, SLC7A14
      SLC8 solute carrier 8 transporter protein family
      SLC8A1, SLC8A2, SLC8A3
      SLC9 solute carrier 9 transporter protein family
      SLC9A1, SLC9A2, SLC9A3, SLC9A4, SLC9A5, SLC9A6, SLC9A7, SLC9A8,
      SLC9A9, SLC9A10, SLC9A11
      SLC10 solute carrier 10 transporter protein family
      SLC10A1, SLC10A2, SLC10A3, SLC10A4, SLC10A5, SLC10A6, SLC10A7
      SLC11 solute carrier 11 transporter protein family
      SLC11A1
      SCL11A2 or hDMT
          SLC11A2 transcript variant 4
          SLC11A2 transcript variant 1
          SLC11A2 transcript variant 2
          SLC11A2 transcript variant 3
          SLC11A2 transcript variant 5
          SLC11A2 transcript variant 6
          SLC11A2 transcript variant 7
      SLC12 solute carrier 12 transporter protein family
      SLC12A1, SLC12A1, SLC12A2, SLC12A3, SLC12A4, SLC12A5, SLC12A6,
      SLC12A7, SLC12A8, SLC12A9
      SLC13 solute carrier 13 transporter protein family
      SLC13A1, SLC13A2, SLC13A3, SLC13A4, SLC13A5
      SLC14 solute carrier 14 transporter protein family
      SLC14A1, SLC14A2
      SLC15 solute carrier 15 transporter protein family
      SLC15A1, SLC15A2, SLC15A3, SLC15A4
      SLC16 solute carrier 16 transporter protein family
      SLC16A1, SLC16A2, SLC16A3, SLC16A4, SLC16A5, SLC16A6, SLC16A7,
      SLC16A8, SLC16A9, SLC16A10, SLC16A11, SLC16A12, SLC16A13,
      SLC16A14
      SLC17 solute carrier 17 transporter protein family
      SLC17A1, SLC17A2, SLC17A3, SLC17A4, SLC17A5, SLC17A6, SLC17A7,
      SLC17A8
      SLC18 solute carrier 18 transporter protein family
      SLC18A1, SLC18A2, SLC18A3
      SLC19 solute carrier 19 transporter protein family
      SLC19A1, SLC19A2, SLC19A3
      SLC20 solute carrier 20 transporter protein family
      SLC20A1, SLC20A2
      SLC21 solute carrier 21 transporter protein family
            subfamily 1; SLCO1A2, SLCO1B1, SLCO1B3, SLCO1B4,
            SLCO1C1
            subfamily 2; SLCO2A1, SLCO2B1
            subfamily 3; SLCO3A1
            subfamily 4; SLCO4A1, SLCO4C1
            subfamily 5; SLCO5A1
      SLC22 solute carrier 22 transporter protein family
      SLC22A1, SLC22A2, SLC22A3, SLC22A4, SLC22A5, SLC22A6, SLC22A7,
      SLC22A8, SLC22A9, SLC22A10, SLC22A11, SLC22A12, SLC22A13,
      SLC22A14, SLC22A15, SLC22A16, SLC22A17, SLC22A18, SLC22A19,
      SLC22A20
      SLC23 solute carrier 23 transporter protein family
      SLC23A1, SLC23A2, SLC23A3, SLC23A4
      SLC24 solute carrier 24 transporter protein family
      SLC24A1, SLC24A2, SLC24A3, SLC24A4, SLC24A5, SLC24A6
      SLC25 solute carrier 25 transporter protein family
      SLC25A1, SLC25A2, SLC25A3, SLC25A4, SLC25A5, SLC25A6, SLC25A7,
      SLC25A8, SLC25A9, SLC25A10, SLC25A11, SLC25A12, SLC25A13,
      SLC25A14, SLC25A15, SLC25A16, SLC25A17, SLC25A18, SLC25A19,
      SLC25A20, SLC25A21, SLC25A22, SLC25A23, SLC25A24, SLC25A25,
      SLC25A26, SLC25A27, SLC25A28, SLC25A29, SLC25A30, SLC25A31,
      SLC25A32, SLC25A33, SLC25A34, SLC25A35, SLC25A36, SLC25A37,
      SLC25A38, SLC25A39, SLC25A40, SLC25A41, SLC25A42, SLC25A43,
      SLC25A44, SLC25A45, SLC25A46
      SLC26 solute carrier 26 transporter protein family
      SLC26A1, SLC26A2, SLC26A3, SLC26A4, SLC26A5, SLC26A6, SLC26A7,
      SLC26A8, SLC26A9, SLC26A10, SLC26A11
      SLC27 solute carrier 27 transporter protein family
      SLC27A1, SLC27A2, SLC27A3, SLC27A4, SLC27A5, SLC27A6
      SLC28 solute carrier 28 transporter protein family
      SLC28A1, SLC28A2, SLC28A3
      SLC29 solute carrier 29 transporter protein family
      SLC29A1, SLC29A2, SLC29A3, SLC29A4
      SLC30 solute carrier 30 transporter protein family
      SLC30A1, SLC30A2, SLC30A3, SLC30A4, SLC30A5, SLC30A6, SLC30A7,
      SLC30A8, SLC30A9, SLC30A10
      SLC31 solute carrier 31 transporter protein family
      SLC31A1
      SLC32 solute carrier 32 transporter protein family
      SLC32A1
      SLC33 solute carrier 33 transporter protein family
      SLC33A1
      SLC34 solute carrier 34 transporter protein family
      SLC34A1, SLC34A2, SLC34A3
      SLC35 solute carrier 35 transporter protein family
          subfamily A; SLC35A1, SLC35A2, SLC35A3, SLC35A4, SLC35A5
          subfamily B; SLC35B1, SLC35B2, SLC35B3, SLC35B4
          subfamily C; SLC35C1, SLC35C2
          subfamily D; SLC35D1, SLC35D2, SLC35D3
          subfamily E; SLC35E1, SLC35E2, SLC35E3, SLC35E4
      SLC36 solute carrier 36 transporter protein family
      SLC36A1, SLC36A2, SLC36A3, SLC36A4
      SLC37 solute carrier 37 transporter protein family
      SLC37A1, SLC37A2, SLC37A3, SLC37A4
      SLC38 solute carrier 38 transporter protein family
      SLC38A1, SLC38A2, SLC38A3, SLC38A4, SLC38A5, SLC38A6
      SLC39 solute carrier 39 transporter protein family
      SLC39A1, SLC39A2, SLC39A3, SLC39A4, SLC39A5, SLC39A6, SLC39A7,
      SLC39A8, SLC39A9, SLC39A10, SLC39A11, SLC39A12, SLC39A13,
      SLC39A14
      SLC40 solute carrier 40 transporter protein family
      SLC40A1
      SLC41 solute carrier 41 transporter protein family
      SLC41A1, SLC41A2, SLC41A3
      SLC42 solute carrier 42 transporter protein family
      RHAG, RhBG, RhCG
      SLC43 solute carrier 43 transporter protein family
      SLC43A1
      SLC43A2
      SLC43A3
      SLC44 solute carrier 44 transporter protein family
      SLC44A1, SLC44A2, SLC44A3, SLC44A4, SLC44A5
      SLC45 solute carrier 45 transporter protein family
      SLC45A1, SLC45A2, SLC54A3, SLC45A4
      SLC46 solute carrier 46 transporter protein family
      SLC46A1, SLC46A2
      SLC47 solute carrier 47 transporter protein family
      SLC47A1, SLC47A2
MRI Imaging
      Human transferrin receptor
      Human transferrin receptor
      Mouse transferrin receptor
      Human ferritin light chain (FTL)
      Human ferritin heavy chain
      FTL 498-199InsTC, a mutated form of the ferritin light chain
      Bacterial ferritin
          E. coli
          E. coli strain K12
          S. aureus strain MRSA252
          S. aureus strain NCTC 8325
          H. pylori B8
      bacterioferritin
      codon optimized bacterioferritin
      MagA
Enzymes that modify a substrate to produce a detectable product or signal, or are
detectable by antibodies
      alpha-amylase
      alkaline phosphatase
      secreted alkaline phosphatase
      peroxidase
      T4 lysozyme
      oxidoreductase
      pyrophosphatase
Therapeutic genes
therapeutic gene product
antigens
          tumor specific antigens
          tumor-associated antigens
          tissue-specific antigens
          bacterial antigens
          viral antigens
          yeast antigens
          fungal antigens
          protozoan antigens
          parasite antigens
          mitogens
an antibody or fragment thereof
          virus-specific antibodies
antisense RNA
siRNA
      siRNA directed against expression of a tumor-promoting gene
          an oncogene
          growth factor
          angiogenesis promoting gene
          a receptor
      siRNA molecule directed against expression of any gene essential for cell growth,
      cell replication or cell survival.
      siRNA molecule directed against expression of any gene that stabilizes the cell
      membrane or otherwise limits the number of tumor cell antigens released from the
      tumor cell.
protein ligands
an antitumor oligopeptide
an antimitotic peptide
          tubulysin,
          phomopsin
          hemiasterlin
          taltobulin (HT1-286, 3)
          cryptophycin
      a mitosis inhibitor protein
      an antimitotic oligopeptide
      an anti-cancer polypeptide antibiotic
      anti-cancer antibiotics
tissue factors
      Tissue Factor (TF)
      αvβ3-integrin RGD fusion protein
Immune modulatory molecules
      GM-CSF
      MCP-1 or CCL2 (Monocyte Chemoattractant Protein-1) Human
      MCP-1 murine
      IP-10 or Chemokine ligand 10 (CXCL10)
      LIGHT
      P60 or SEQSTM1 (Sequestosome 1 transcript variant 1)
      P60 or SEQSTM1 (Sequestosome 1 transcript variant 3)
      P60 or SEQSTM1 (Sequestosome 1 transcript variant 2)
      OspF
      OspG
      STAT1alpha
      STAT1beta
Interleukins
      IL-18 (Interleukin-18)
      IL-11 (Interleukin-11)
      IL-6 (Interleukin-6)
      sIL-6R-IL-6
      interleukin-12
      interleukin-1
      interleukin-2
      IL-24 (Interleukin-24)
      IL-24 transcript variant 1
      IL-24 transcript variant 4
      IL-24 transcript variant 5
      IL-4
      IL-8
      IL-10
chemokines
      IP-10 (CXCL)
      Thrombopoetin
      members of the C-X-C and C-C chemokine families
      RANTES
      MIP1-alpha
      MIP1 -beta
      MIP-2
CXC chemokines
      GROα
      GROβ (MIP-2)
      GROγ
      ENA-78
      LDGF-PPBP
      GCP-2
      PF4
      Mig
      IP-10
      SDF-1α/β
      BUNZO/STRC33
      I-TAC
      BLC/BCA-1
      MDC
      TECK
      TARC
      HCC-1
      HCC-4
      DC-CK1
      MIP-3α
      MIP-3β
      MCP-2
      MCP-3 (Monocyte Chemoattractant Protein-3, CCL7)
      MCP-4
      MCP-5 (Monocyte Chemoattractant Protein-5; CCL12)
      Eotaxin (CCL11)
      Eotaxin-2/MPIF-2
      I-309
      MIP-5/HCC-2
      MPIF-1
      6Ckine
      CTACK
      MEC
      lymphotactin
      fractalkine
Immunoglobulin superfamily of cytokines
      B7.1
      B7.2.
Anti-angiogenic genes/angiogenesis inhibitors
      Human plasminogen k5 domain (hK5)
      PEDF (SERPINF1) (Human)
      PEDF (mouse)
      anti-VEGF single chain antibody (G6)
      anti-DLL4 s.c. antibody GLAF-3
      tTF-RGD (truncated human tissue factor protein fused to an RGD peptide)
viral attenuation factors
      Interferons
          IFN-γ
          IFN-α
          IFN-β
Antibody or scFv
      Therapeutic antibodies (i.e. anticancer antibodies)
          Rituximab (RITUXAN)
          ADEPT
          Trastuzumab (Herceptin)
          Tositumomab (Bexxar)
          Cetuximab (Erbitux ®)
          Ibritumomab (90Y-Ibritumomab tiuexetan; Zevalin ®)
          Alemtuzumab (Campathe ®-1H)
          Epratuzumab (Lymphocide ®)
          Gemtuzumab ozogamicin (Mylotarg ®)
          Bevacimab (Avastin ®) and Edrecolomab (Panorex ®)
          Infliximab
Metastasis suppressor genes
      NM23 or NME1 Isoform a
      NM23 or NME1 Isoform b
Anti-metastatic genes
      E-Cad
      Gelsolin
      LKB1 (STK11)
      RASSF1
      RASSF2
      RASSF3
      RASSF4
      RASSF5
      RASSF6
      RASSF7
      RASSF8
      Syk
      TIMP-1 (Tissue Inhibitor of Metalloproteinase Type-1)
      TIMP-2 (Tissue Inhibitor of Metalloproteinase Type-2)
      TIMP-3 (Tissue Inhibitor of Metalloproteinase Type-3)
      TIMP-4 (Tissue Inhibitor of Metalloproteinase Type-4)
      BRMS-1
      CRMP-1
      CRSP3
      CTGF
      DRG1
      KAI1
      KiSS1 (kisspeptin)
      kisspeptin fragments
          kisspeptin-10
          kisspeptin-13
          kisspeptin-14
          kisspeptin-54
      Mkk4
      Mkk6
      Mkk7
      RKIP
      RHOGDI2
      SSECKS
      TXNIP/VDUP1
Cell matrix-degradative genes
      Relaxin 1
      hMMP9
Hormones
      Human Erythropoietin (EPO)
MicroRNAs
      pre-miRNA 181a (sequence inserted into viral genome)
      miRNA 181a
      mmu-miR-181a MIMAT0000210 mature miRNA 181a
      pre-miRNA 126 (sequence inserted into the vial genome)
      miRNA 126
      hsa-miR-126 MI000471
      hsa-miR-126 MIMAT0000445
      pre-miRNA 335 (sequence inserted into the viral genome)
      miRNA 335
      hsa-miR-335 MI0000816
      hsa-miR-335 MIMAT0000765
Genes for tissue regeneration and reprogramming Human somatic cells to pluripotency
      nAG
      Oct4
      NANOG
      Ngn (Neogenin 1) transcript variant 1
      Ngn (Neogenin 1) transcript variant 2
      Ngn (Neogenin 1) transcript variant 3
      Ngn3
      Pdx1
      Mafa
Additional Genes
      Myc-CTR1
      FCU1
      mMnSOD
      HACE1
      nppa1
      GCP-2 (Granulocyte Chemotactic Protein-2, CXCL6)
      hADH
      Wildtype CDC6
      Mut CDC6
      GLAF-3 anti-DLL4 scFv
      GLAF-4 anti-FAP (Fibroblast Activation Protein) scFv (Brocks et al., (2001) Mol.
      Medicine 7(7): 461-469)
      GLAF-5 anti-FAP scFv
      BMP4
      wildtype F14.5L
Other Proteins
      WT1
      p53
      pseudomonas A endotoxin
      diphtheria toxin
      Arf or p16
      Bax
      Herpes simplex virus thymidine kinase
      E. coli purine nucleoside phosphorylase
      angiostatin
      endostatin
      Rb
      BRCA1
      cystic fibrosis transmembrane regulator (CFTR)
      Factor VIII
      low density lipoprotein receptor
      alpha-galactosidase
      beta-glucocerebrosidase
      insulin
      parathyroid hormone
      alpha-1-antitrypsin
      rsCD40L
      Fas-ligand
      TRAIL
      TNF
      microcin E492
      xanthineguanine phosphoribosyltransferase (XGPRT)
      E. coli guanine phosphoribosyltransferase (gpt)
      hyperforin
      endothelin-1 (ET-1)
      connective tissue growth factor (CTGF)
      vascular endothelial growth factor (VEGF)
      cyclooxygenase
      COX-2
      cyclooxygenase-2 inhibitor
      MPO (Myeloperoxidase)
      Apo A1 (Apolipoprotein A1)
      CRP (C Reactive Protein)
      Fibrinogen
      SAP (Serum Amyloid P)
      FGF-basic (Fibroblast Growth Factor-basic)
      PPAR-agonist
      PE37/TGF-alpha fusion protein
Replacement of the A34R gene with another A34R gene from a different strain in order
to increase the EEV form of the virus
      A34R from VACV IHD-J
      A34R with a mutation at codon 151 (Lys 151 to Asp)
      A34R with a mutation at codon 151 (Lys 151 to Glu)
Non-coding Sequence
      Non-proteins
      Non-coding nucleic acid
Ribozymes
      Group I introns
      Group II introns
      RNaseP
      hairpin ribozymes
      hammerhead ribozymes
Prodrug converting enzymes
      varicella zoster thymidine kinase
      cytosine deaminase
      purine nucleoside phosphorylase (e.g., from E. coli)
      beta lactamase
      carboxypeptidase G2
      carboxypeptidase A
      cytochrome P450
          cytochrome P450-2B1
          cytochrome P450-4B1
      horseradish peroxidase
      nitroreductase
      rabbit carboxylesterase
      mushroom tyrosinase
      beta galactosidase (lacZ) (i.e., from E. coli)
      beta glucuronidase (gusA)
      thymidine phosphorylase
      deoxycytidine kinase
      linamerase
Proteins detectable by antibodies
      chloramphenicol acetyl transferase
      hGH
Viral attenuation factors
      virus-specific antibodies
          mucins
          thrombospondin
      tumor necrosis factors (TNFs)
          TNFα
Superantigens
Toxins
      diphtheria toxin
      Pseudomonas exotoxin
      Escherichia coli Shiga toxin
      Shigella toxin
      Escherichia coli Verotoxin 1
      Toxic Shock Syndrome Toxin 1
      Exfoliating Toxins (EXft)
      Streptococcal Pyrogenic Exotoxin (SPE) A, B and C
      Clostridial Perfringens Enterotoxin (CPET)
      staphylococcal enterotoxins
          SEA, SEB, SEC1, SEC2, SED, SEE and SEH
      Mouse Mammary Tumor Virus proteins (MMTV)
      Streptococcal M proteins
      Listeria monocytogenes antigen p60
      mycoplasma arthritis superantigens
Proteins that can bind a contrasting agent, chromophore, or a compound or ligand that
can be detected
      siderophores
          enterobactin
          salmochelin
          yersiniabactin
          aerobactin
Growth Factors
      platelet-derived growth factor (PDG-F)
      keratinocyte growth factor (KGF)
      insulin-like growth factor-1 (IGF-1)
      insulin-like growth factor-binding proteins (IGFBPs)
      transforming growth factor (TGF-alpha)
      Growth factors for blood cells
          Granulocyte Colony Stimulating Factor (G-CSF)
      growth factors that can boost platelets
Other Groups
      BAC (Bacterial Artificial Chromosome) encoding several or all proteins of a
specific pathway, e.g. woundhealing-pathway
      MAC (Mammalian Artificial Chromosome) encoding several or all proteins of a
specific pathway, e. g. woundhealing-pathway
      tumor antigen
      RNAi
      ligand binding proteins
      proteins that can induce a signal detectable by MRI
      angiogenins
      photosensitizing agents
      anti-metabolites
      signaling modulators
      chemotherapeutic compounds
      lipases
      proteases
      pro-apoptotic factors
      anti-cancer vaccine
          antigen vaccines
          whole cell vaccines (i.e., dendritic cell vaccines)
          DNA vaccines
          anti-idiotype vaccines
      tumor suppressors
      cytotoxic protein
      cytostatic proteins
      costimulatory molecules
          cytokines and chemokines
      cancer growth inhibitors
      gene therapy
      BCG vaccine for bladder cancer
Proteins that interact with host cell proteins
```

### (ii) Anti-Metastatic Genes

[0462] The oncolytic reporter viruses used in the methods provided herein can encode one more anti-metastatic agents that inhibit one or more steps of the metastatic cascade. In some examples, the viruses provided herein encode one more anti-metastatic agents that inhibit invasion of local tissue. In other examples, the oncolytic reporter viruses used in the methods provided herein encode one more anti-metastatic agents that inhibit intravasation into the bloodstream or lymphatics. In other examples, the oncolytic reporter viruses used in the methods provided herein encode one more anti-metastatic agents that inhibit cell survival and transport through the bloodstream or lymphatics as emboli or potentially single cells. In other examples, the oncolytic reporter viruses used in the methods provided herein encode one more anti-metastatic agents that inhibit cell lodging in microvasculature at the secondary site. In other examples, the oncolytic reporter viruses used in the methods provided herein encode one more anti-metastatic agents that inhibit growth into microscopic lesions and subsequently into overt metastatic lesions. In other examples, the oncolytic reporter viruses used in the methods provided herein encode one more anti-metastatic agents that inhibit metastasis formation and growth within the primary tumor, where the inhibition of metastasis formation is not a consequence of inhibition of primary tumor growth. Anti-metastatic agents can inhibit specific steps in the metastatic cascade or multiple steps in the metastatic cascade.

[0463] An anti-metastatic agent expressed by a virus provided herein that inhibits metastasis of a tumor in one cell type can inhibit metastasis of other types of tumor cells. For example, an anti-metastatic agent expressed by a virus provided herein that inhibits metastasis of breast tumors also can inhibit metastasis of melanoma tumors (Welch et al. (2003) J. Natl. Cancer Inst. 95(12):839-841; Welch et al. (1999) J. Natl. Cancer Inst. 91:1351-1353; Kauffman et al. (2003) J. Urol. 169:1122-1133; Shevde et al., (2003) Cancer Lett. 198:1-20).

[0464] Anti-metastatic agents expressed by the viruses provided herein can directly or indirectly inhibit one or more steps of the metastatic cascade. Exemplary anti-metastatic agents that can be expressed by the oncolytic reporter viruses used in the methods provided herein include, but are not limited to, the following: BRMS-1 (Breast Cancer Metastasis Suppressor 1), CRMP-1 (Collapsin Response Mediator Protein-1), CRSP-3 (Cofactor Required for Sp1 transcriptional activation subunit 3), CTGF (Connective Tissue Growth Factor), DRG-1 (Developmentally-regulated GTP-binding protein 1), E-Cad (E-cadherin), gelsolin, KAI1, KiSS1 (Kisspeptin 1/Metastin), kispeptin-10, kispeptin-13, kispeptin-14, kispeptin-54, LKB1 (STK11 (serine/threonine kinase 11)), JNKK1/MKK4 (c-Jun-NH2-Kinase Kinase/Mitogen activated Kinase Kinase 4), MKK6 (mitogen activated kinase kinase 6), MKK7 (mitogen activated kinase kinase 7), Nm23 (NDP Kinase A), RASSF1-8 (Ras association (RalGDS/AF-6) domain family members), RKIP (Raf kinase inhibitor protein), RhoGDI2 (Rho GDP dissociation inhibitor 2), SSECKS (src-suppressed C-kinase substrate), Syk, TIMP-1 (Tissue inhibitor of metalloproteinase-1), TIMP-2 (Tissue inhibitor of metalloproteinase-2), TIMP-3 (Tissue inhibitor of metalloproteinase-3), TIMP-4 (Tissue inhibitor of metalloproteinase-4), TXNIP/VDUP1 (Thioredoxin-interacting protein). Such list of anti-metastatic agents is not meant to be limiting. Any gene product that can suppress metastasis formation via a mechanism that is independent of inhibition of growth within the primary tumor is encompassed by the designation of an anti-metastatic agent or metastasis suppressor and can be expressed by a virus as provided herein. One of skill in the art can identify anti-metastatic genes and can construct a virus expressing one or more anti-metastatic genes for therapy.

[0465] Exemplary anti-metastatic agents exist within many different types of cellular compartments and are not limited to any specific type of biomolecule. Anti-metastatic agents that are expressed by the viruses provided herein can localize within a variety of cellular compartments within the infected cell, on the surface of the infected cell and/or secreted by the infected cell. For example, anti-metastatic agents can be cell surface receptors, such as, for example KAI1, E-cadherin and CD44; intracellular signaling molecules, such as, for example, MKK4, SSeCKs, Nm23, RhoGDI2, DRG-1, and RKIP; secreted ligands, such as, for example TIMPs and KiSS1, nuclear transcription factors and cofactors, such as, for example BRMS1, TXNIP and CRSP3, and proteins localized to the mitochondria, such as, for example, caspase 8 (Welch et al. J. Natl. Cancer Inst. 95(12):839-841 (2003). Anti-metastatic agents also encompass intracellular signaling molecules including cytoskeletal associated proteins, such as, for example, RhoGDI2 and gelsolin, and cytosolic proteins, such as, for example, JNKK1/MKK4, nm23-H1 and RKIP (see, e.g., Dong et al. (1995) Science, 268:884-886; Yin and Stossel, (1979) Nature, 281:583-6; Shimizu et al. (1991) Biochem. Biophys. Res. Commun. 175:199-206; Boller et al., (1985) J Cell Biol. 100:327-332; Girgrah et al., (1991) Neuroreport 2:441-444; Nash et al., (2006) Front Biosci. 11:647-59; Yeung et al., (1999) Nature 401:173-177; Bosnar et al., (2004) Exp. Cell Res. 298:275-284; Rinker-Schaeffer et al., (2006) Clin. Cancer Res. 12:3882-3889).

[0466] d. Exemplary Oncolytic Reporter Viruses for Use in the Methods

[0467] Reporter viruses for use in the methods provided herein typically are replication competent viruses that selectively infect neoplastic cells (i.e. oncolytic viruses). Numerous oncolytic viruses have been identified or developed and are known to those of skill in the art. The methods herein can use any of these viruses for detection of tumor cells. In addition, the methods herein for assessing the effectiveness of such viruses for treating a subject's tumor can be employed for any such viruses. The methods herein detect infected circulating tumor cells. If detected soon after administration of a therapeutic oncolytic reporter virus, detection is indicative that the virus has infected tumors and is indicative that such virus will replicate in and lyse such tumors.

[0468] Oncolytic viruses include virus that preferentially infect and accumulate in tumor cells and viruses that are modified to do so. Viruses and viral vectors include, but are not limited to, poxviruses, herpesviruses, adenoviruses, adeno-associated viruses, lentiviruses, retroviruses, rhabdoviruses, papillomaviruses, vesicular stomatitis virus, measles virus, Newcastle disease virus, picornavirus, Sindbis virus, papillomavirus, parvovirus, reovirus, coxsackievirus, influenza virus, mumps virus, poliovirus, and semliki forest virus. Oncolytic viruses include, but are not limited to, vaccinia viruses, vesicular stomatitis viruses, herpes viruses, measles viruses and adenoviruses. Oncolytic viruses include cytoplasmic viruses that do not require entry of viral nucleic acid molecules in to the nucleus of the host cell during the viral life cycle. A variety of cytoplasmic viruses are known, including, but not limited to, poxviruses, African swine flu family viruses, and various RNA viruses such as picornaviruses, caliciviruses, togaviruses, coronaviruses and rhabdoviruses. Exemplary cytoplasmic viruses provided herein are viruses of the poxvirus family, including orthopoxviruses. Exemplary of poxviruses are vaccinia viruses.

[0469] Such viruses have been employed for the detection and therapy of tumors. One of skill in the art is familiar with and can readily identify such viruses, and can adapt them for the methods described herein. Viruses used in the methods described herein also can be further modified to render them detectable as a reporter virus.

[0470] Viruses for use in the methods provided herein typically are modified viruses, which are modified relative to the wild-type virus. Such modifications of the viruses provided can enhance one or more characteristics of the virus. Such characteristics can include, but are not limited to, attenuated pathogenicity, reduced toxicity, preferential accumulation in tumor, increased ability to activate an immune response against tumor cells, increased immunogenicity, increased or decreased replication competence, and ability to express additional exogenous proteins, and combinations thereof. For examples, the viruses can be modified to express one or more detectable gene products, including proteins that can be used for detecting, imaging and monitoring of CTCs. In other examples, the viruses can be modified to express one or more gene products for the therapy of a tumor.

[0471] Viruses for use in the methods provided herein can contain one or more heterologous nucleic acid molecules inserted into the genome of the virus. A heterologous nucleic acid molecule can contain an open reading frame operatively linked to a promoter for expression or can be a non-coding sequence that alters the attenuation of the virus. In some cases, the heterologous nucleic acid replaces all or a portion of a viral gene.

[0472] i. Poxviruses

[0473] In some examples, the virus used in the methods provided herein is selected from the poxvirus family. Poxviruses include Chordopoxyiridae such as orthopoxvirus, parapoxvirus, avipoxvirus, capripoxvirus, leporipoxvirus, suipoxvirus, molluscipoxvirus and yatapoxvirus, as well as Entomopoxyirinae such as entomopoxvirus A, entomopoxvirus B, and entomopoxvirus C. One skilled in the art can select a particular genera or individual chordopoxyiridae according to the known properties of the genera or individual virus, and according to the selected characteristics of the virus (e.g., pathogenicity, ability to elicit an immune response, preferential tumor localization, preferential tumor cell infection), the intended use of the virus, the tumor type and the host organism. Exemplary chordopoxyiridae genera are orthopoxvirus and avipoxvirus.

[0474] Avipoxviruses are known to infect a variety of different birds and have been administered to humans. Exemplary avipoxviruses include canarypox, fowlpox, juncopox, mynahpox, pigeonpox, psittacinepox, quailpox, peacockpox, penguinpox, sparrowpox, starlingpox, and turkeypox viruses.

[0475] Orthopoxviruses are known to infect a variety of different mammals including rodents, domesticated animals, primates and humans. Several orthopoxviruses have a broad host range, while others have narrower host range. Exemplary orthopoxviruses include buffalopox, camelpox, cowpox, ectromelia, monkeypox, raccoon pox, skunk pox, tatera pox, uasin gishu, vaccinia, variola, and volepox viruses. In some embodiments, the orthopoxvirus selected can be an orthopoxvirus known to infect humans, such as cowpox, monkeypox, vaccinia, or variola virus. Optionally, the orthopoxvirus known to infect humans can be selected from the group of orthopoxviruses with a broad host range, such as cowpox, monkeypox, or vaccinia virus.

### (1) Vaccinia Viruses

[0476] One exemplary orthopoxvirus for use in the methods of detection and therapy of CTCs provided herein is vaccinia virus. Vaccinia virus strains have been shown to specifically colonize solid tumors, while not infecting other organs (see, e.g., Zhang et al. (2007) Cancer Res 67:10038-10046; Yu et al., (2004) Nat Biotech 22:313-320; Heo et al., (2011) Mol Ther 19:1170-1179; Liu et al. (2008) Mol Ther 16:1637-1642; Park et al., (2008) Lancet Oncol, 9:533-542). Vaccinia is a cytoplasmic virus, thus, it does not insert its genome into the host genome during its life cycle. The linear dsDNA viral genome of vaccinia virus is approximately 200 kb in size, encoding a total of approximately 200 potential genes. A variety of vaccinia virus strains are available for uses in the methods provided, including Western Reserve (WR) (SEQ ID NO: 34), Copenhagen (SEQ ID NO: 35), Tashkent, Tian Tan, Lister, Wyeth, 1HD-J, and IHD-W, Brighton, Ankara, MVA, Dairen I, LIPV, LC16M8, LC16MO, LIVP, WR 65-16, Connaught, New York City Board of Health.

[0477] Exemplary vaccinia viruses are Lister or LIVP vaccinia viruses. In one embodiment, the Lister strain can be an attenuated Lister strain, such as the LIVP (Lister virus from the Institute of Viral Preparations, Moscow, Russia) strain, which was produced by further attenuation of the Lister strain. The LIVP strain was used for vaccination throughout the world, particularly in India and Russia, and is widely available. In another embodiment, the viruses and methods provided herein can be based on modifications to the Lister strain of vaccinia virus.

[0478] Lister (also referred to as Elstree) vaccinia virus is available from any of a variety of sources. For example, the Elstree vaccinia virus is available at the ATCC under Accession Number VR-1549. The Lister vaccinia strain has high transduction efficiency in tumor cells with high levels of gene expression. LIVP and its production are described, for example, in U.S. Pat. Nos. 7,588,767, 7,588,771, 7,662,398 and 7,754,221 and U.S. Patent Publication Nos. 2007/0202572, 2007/0212727, 2010/0062016, 2009/0098529, 2009/0053244, 2009/0155287, 2009/0117034, 2010/0233078, 2009/0162288, 2010/0196325, 2009/0136917 and 2011/0064650.

[0479] Vaccinia virus possesses a variety of features for use in cancer gene therapy and vaccination including broad host and cell type range, a large carrying capacity for foreign genes (up to 25 kb of exogenous DNA fragments (approximately 12% of the vaccinia genome size) can be inserted into the vaccinia genome), high sequence homology among different strains for designing and generating modified viruses in other strains, and techniques for production of modified vaccinia strains by genetic engineering are well established (Moss (1993) Curr. Opin. Genet. Dev. 3: 86-90; Broder and Earl (1999) Mol. Biotechnol. 13: 223-245; Timiryasova et al. (2001) Biotechniques 31: 534-540). A variety of vaccinia virus strains are available, including Western Reserve (WR), Copenhagen, Tashkent, Tian Tan, Lister, Wyeth, IHD-J, and IHD-W, Brighton, Ankara, MVA, Dairen I, LIPV, LC16M8, LC16MO, LIVP, WR 65-16, Connaught, New York City Board of Health. Exemplary of vaccinia viruses for use in the methods provided herein include, but are not limited to, Lister strain or LIVP strain of vaccinia viruses.

[0480] The exemplary modifications of the Lister strain described herein (see Example 1) also can be adapted to other vaccinia viruses (e.g., Western Reserve (WR), Copenhagen, Tashkent, Tian Tan, Lister, Wyeth, IHD-J, and IHD-W, Brighton, Ankara, MVA, Dairen I, LIPV, LC16M8, LC16MO, LIVP, WR 65-16, Connaught, New York City Board of Health). The modifications of the Lister strain described herein also can be adapted to other viruses, including, but not limited to, viruses of the poxvirus family, adenoviruses, herpes viruses and retroviruses.

[0481] LIVP strains that can be used in the methods provided herein include LIVP clonal strains derived from LIVP that have a genome that is or is derived from or is related to a the parental sequence set forth in SEQ ID NO: 2 (see U.S. Patent Pub. No. 2012-0308484, which is incorporated herein by reference). These include LIVP clonal strains that have been shown to exhibit greater anti-tumorigenicity and/or reduced toxicity compared to the recombinant or modified virus strain designated GLV-1h68 (having a genome set forth in SEQ ID NO:1; and U.S. Patent Pub. No. 2012-0308484). In particular, the clonal strains are present in a virus preparation propagated from LIVP. Exemplary LIVP clonal strains include but are not limited to LIVP 1.1.1 (SEQ ID NO: 36), LIVP 2.1.1 (SEQ ID NO: 37), LIVP 4.1.1 (SEQ ID NO: 38), LIVP 5.1.1 (SEQ ID NO: 39), LIVP 6.1.1 (SEQ ID NO: 40), LIVP 7.1.1 (SEQ ID NO: 41), and LIVP 8.1.1 (SEQ ID NO: 42).

[0482] For purposes herein, the methods are exemplified with GLV-1h68 and GLV-1h254, but it is understood that the methods can be employed with any oncolytic virus that can be detected and that accumulates in CTC cells.

[0483] The LIVP and clonal strains for use in the methods provided herein have a sequence of nucleotides that have at least 70%, such as at least 75%, 80%, 85% or 90% sequence identity to SEQ ID NO: 2. For example, the clonal strains have a sequence of nucleotides that has at least 91%, 92%, 93%, 94%, 95%, 95%, 96%, 97%, 98%, 99%, 99.1%, 99.2%, 99.3%, 99.4%, 99.5%, 99.6%, 99.7%, 99.8%, 99.9%, or 100% identical SEQ ID NO: 2. Such LIVP clonal viruses include viruses that differ in one or more open reading frames (ORF) compared to the parental LIVP strain that has a sequence of amino acids set forth in SEQ ID NO: 2. The LIVP clonal virus strains provided herein can contain a nucleotide deletion or mutation in any one or more nucleotides in any ORF compared to SEQ ID NO: 2, or can contain an addition or insertion of viral DNA compared to SEQ ID NO: 2.

[0484] In some examples, the LIVP strain for use in the methods is a clonal strain of LIVP or a modified form thereof containing a sequence of nucleotides that has at least 97% sequence identity to a sequence of nucleotides 2,256-180,095 of SEQ ID NO:36, nucleotides 11,243-182,721 of SEQ ID NO:37, nucleotides 6,264-181,390 of SEQ ID NO:38, nucleotides 7,044-181,820 of SEQ ID NO:39, nucleotides 6,674-181,409 of SEQ ID NO:40, nucleotides 6,716-181,367 of SEQ ID NO:41 or nucleotides 6,899-181,870 of SEQ ID NO:42.

### (a) Modified Vaccinia Viruses

[0485] Exemplary vaccinia viruses for use in the methods provided herein include vaccinia viruses with insertions, mutations or deletions. Exemplary insertions, mutations or deletions include those that result in an attenuated vaccinia virus relative to the wild type strain. For example, vaccinia virus insertions, mutations or deletions can decrease pathogenicity of the vaccinia virus, for example, by reducing the toxicity, reducing the infectivity, reducing the ability to replicate, or reducing the number of non-tumor organs or tissues to which the vaccinia virus can accumulate. Other exemplary insertions, mutations or deletions include, but are not limited to, those that increase antigenicity of the virus, those that permit detection, monitoring, or imaging, those that alter attenuation of the virus, and those that alter infectivity. For example, the ability of vaccinia viruses provided herein to infect and replicate within tumors can be enhanced by mutations that increase the extracellular enveloped form of the virus (EEV) that is released from the host cell, as described elsewhere herein. Modifications can be made, for example, in genes that are involved in nucleotide metabolism, host interactions and virus formation or at other nonessential gene loci. Any of a variety of insertions, mutations or deletions of the vaccinia virus known in the art can be used herein, including insertions, mutations or deletions of: the thymidine kinase (TK) gene, the hemagglutinin (HA) gene, and F14.5L gene, among others (e.g., A35R, E2L/E3L, K1L/K2L, superoxide dismutase locus, 7.5K, C7-K1L, J2R, B13R+B14R, A56R, A26L or 14L gene loci). The vaccinia viruses for use in the methods provided herein also can contain two or more insertions, mutations or deletions. Thus, included are vaccinia viruses containing two or more insertions, mutations or deletions of the loci provided herein or other loci known in the art. The viruses can be based on modifications to the Lister strain and/or LIVP strain of vaccinia virus. Any known vaccinia virus, or modifications thereof that correspond to those provided herein or known to those of skill in the art to reduce toxicity of a vaccinia virus. Generally, however, the mutation will be a multiple mutant and the virus will be further selected to reduce toxicity.

[0486] The modified viruses for use in the methods provided herein can encode heterologous gene products. The heterologous nucleic acid is typically operably linked to a promoter for expression of the heterologous gene in the infected cells. Suitable promoter include viral promoters, such as a vaccinia virus natural and synthetic promoters. Exemplary vaccinia viral promoters include, but are not limited to, P11k, P7.5k early/late, P7.5k early, P28 late, synthetic early P_{SE}, synthetic early/late P_{SEL}, and synthetic late P_{SL} promoters.

### (b) Exemplary Modified Vaccinia Viruses

[0487] Exemplary vaccinia viruses include those derived from vaccinia virus strain GLV-1h68 (also designated RVGL21 and for clinical trial as GL-ONC1; see SEQ ID NO:1), which has been described in U.S. Pat. Pub. No. 2005-0031643, now U.S. Pat. No. 7,588,767; see, also U.S. Provisional Application Ser. No. 61/517,297 (U.S. Patent Pub. No. 2012-0308484), which provides sequences of clonal strains of LIVP and derivatives thereof, including GLV-1h68).

[0488] GLV-1h68 contains DNA insertions into gene in an LIVP strain of vaccinia virus (SEQ ID NO: 2). The LIVP vaccinia virus strain was originally prepared by adapting the Lister strain (ATCC Catalog No. VR-1549) to calf skin (Institute of Viral Preparations, Moscow, Russia, Al'tshtein et al., (1983) Dokl. Akad. Nauk USSR 285:696-699)). It is available from the Institute of Viral Preparations. GLV-1h68 contains expression cassettes encoding detectable marker proteins in the F14.5L (also designated in LIVP as F3), thymidine kinase (TK) and hemagglutinin (HA) gene loci. An expression cassette containing a Ruc-GFP cDNA molecule (a fusion of DNA encoding Renilla luciferase and DNA encoding GFP) under the control of a vaccinia synthetic early/late promoter P_{SEL} ((P_{SEL})Ruc-GFP) is inserted into the F14.5L gene locus; an expression cassette containing a DNA molecule encoding beta-galactosidase under the control of the vaccinia early/late promoter P_{7.5k} ((P_{7.5k})LacZ) and DNA encoding a rat transferrin receptor positioned in the reverse orientation for transcription relative to the vaccinia synthetic early/late promoter P_{SEL} ((P_{SEL})rTrfR) is inserted into the TK gene locus (the resulting virus does not express transferrin receptor protein since the DNA molecule encoding the protein is positioned in the reverse orientation for transcription relative to the promoter in the cassette); and an expression cassette containing a DNA molecule encoding β-glucuronidase under the control of the vaccinia late promoter P₁₁ₖ ((P₁₁ₖ)gusA) is inserted into the HA gene locus. The GLV-1h68 virus exhibits a strong preference for accumulation in tumor tissues compared to non-tumorous tissues following systemic administration of the virus to tumor bearing subjects. This preference is significantly higher than the tumor selective accumulation of other vaccinia viral strains, such as WR (see, e.g. U.S. Pat. Pub. No. 2005-0031643 and Zhang et al. (2007) Cancer Res. 67(20):10038-10046).

[0489] Modified viruses for use in the methods provided herein include the strain designed GLV-1h68 (SEQ ID NO: 1) and all strains, derivatives, and modified forms thereof that contain different or additional insertions, deletions, and also variants thereof (see, e.g., U.S. Pat. Nos. 7,588,767, 7,588,771, 7,662,398 and 7,754,221 and U.S. Patent Publication Nos. 2007/0202572, 2007/0212727, 2010/0062016, 2009/0098529, 2009/0053244, 2009/0155287, 2009/0117034, 2010/0233078, 2009/0162288, 2010/0196325, 2009/0136917 and 2011/0064650). Exemplary viruses are generated by replacement of one or more expression cassettes of the GLV-1h68 strain with heterologous DNA encoding gene products for therapy and/or imaging.

[0490] Non-limiting examples of viruses that are derived from attenuated LIVP viruses, such as GLV-1h68, and that are reporter viruses that can be employed for CTC detection, include, but are not limited to, LIVP viruses described in U.S. Pat. Nos. 7,588,767, 7,588,771, 7,662,398 and 7,754,221 and U.S. Patent Publication Nos. 2007/0202572, 2007/0212727, 2010/0062016, 2009/0098529, 2009/0053244, 2009/0155287, 2009/0117034, 2010/0233078, 2009/0162288, 2010/0196325 and 2009/0136917, which are incorporated herein by reference in their entirety. For example, the vaccinia virus can be selected from among GLV-1h22, GLV-1h68, GLV-1i69, GLV-1h70, GLV-1h71, GLV-1h72, GLV-1h73, GLV-1h74, GLV-1h81, GLV-1h82, GLV-1h83, GLV-1h84, GLV-1h85, or GLV-1h86, which are described in U.S. Patent Publication No. 2009/0098529 and GLV-1h104, GLV-1h105, GLV-1h106, GLV-1h107, GLV-1h108 and GLV-1h109, which are described in U.S. Patent Publication No. 2009/0053244; GLV-1h99, GLV-1h100, GLV-1h101, GLV-1h139, GLV-1h146, GLV-1h151, GLV-1h152 and GLV-1h153, which are described in U.S. Patent Publication No. 2009/0117034.

[0491] Exemplary reporter viruses provided herein that encode the far-red fluorescent protein TurboFP635 (scientific name “Katushka”) from the sea anemone Entacmaea quadricolor include GLV-1h188 (SEQ ID NO:3), GLV-1h189 (SEQ ID NO:4), GLV-1h190 (SEQ ID NO:5), GLV-1h253 (SEQ ID NO:6) and GLV-1h254 (SEQ ID NO:7).

[0492] Exemplary of viruses which have one or more expression cassettes removed from GLV-1h68 and replaced with a heterologous non-coding DNA molecule include GLV-1h70, GLV-1h71, GLV-1h72, GLV-1h73, GLV-1h74, GLV-1h85, and GLV-1h86. GLV-1h70 contains (P_{SEL})Ruc-GFP inserted into the F14.5L gene locus, (P_{SEL})rTrfR and (P_{7.5k})LacZ inserted into the TK gene locus, and a non-coding DNA molecule inserted into the HA gene locus in place of (P₁₁ₖ)gusA. GLV-1h71 contains a non-coding DNA molecule inserted into the F14.5L gene locus in place of (P_{SEL})Ruc-GFP, (P_{SEL})rTrfR and (P_{7.5k})LacZ inserted into the TK gene locus, and (P₁₁ₖ)gusA inserted into the HA gene locus. GLV-1h72 contains (P_{SEL})Ruc-GFP inserted into the F14.5L gene locus, a non-coding DNA molecule inserted into the TK gene locus in place of (P_{SEL})rTrfR and (P_{7.5k})LacZ, and P₁₁ₖgusA inserted into the HA gene locus. GLV-1h73 contains a non-coding DNA molecule inserted into the F14.5L gene locus in place of (P_{SEL})Ruc-GFP, (P_{SEL})rTrfR and (P_{7.5k})LacZ inserted into the TK gene locus, and a non-coding DNA molecule inserted into the HA gene locus in place of (P₁₁ₖ)gusA. GLV-1h74 contains a non-coding DNA molecule inserted into the F14.5L gene locus in place of (P_{SEL})Ruc-GFP, a non-coding DNA molecule inserted into the TK gene locus in place of (P_{SEL)}rTrfR and (P_{7.5k})LacZ, and a non-coding DNA molecule inserted into the HA gene locus in place of (P₁₁ₖ)gusA. GLV-1h85 contains a non-coding DNA molecule inserted into the F14.5L gene locus in place of (P_{SEL})Ruc-GFP, a non-coding DNA molecule inserted into the TK gene locus in place of (P_{SEL})rTrfR and (P_{7.5k})LacZ, and (P₁₁ₖ)gusA inserted into the HA gene locus. GLV-1h86 contains (P_{SEL})Ruc-GFP inserted into the F14.5L gene locus, a non-coding DNA molecule inserted into the TK gene locus in place of (P_{SEL})rTrfR and (P_{7.5k})LacZ, and a non-coding DNA molecule inserted into the HA gene locus in place of (P₁₁ₖ)gusA.

[0493] Other exemplary viruses include, but are not limited to, LIVP viruses that encode additional imaging agents such as ferritin and/or a transferrin receptor (e.g., GLV-1h82 and GLV-1h83 which encode E. coli ferritin at the HA locus; GLV-1h82 addition encodes the human transferrin receptor at the TK locus) or a click beetle luciferase-red fluorescent protein fusion protein (e.g., GLV-1h84, which encodes CBG99 and mRFP1 at the TK locus). During translation, the two proteins are cleaved into two individual proteins at picornavirus 2A element (Osborn et al., (2005) Mol. Ther. 12: 569-574). CBG99 produces a more stable luminescent signal than does Renilla luciferase with a half-life of greater than 30 minutes, which makes in vitro and in vivo assays more convenient. mRFP1 provides improvements in in vivo imaging relative to GFP since mRFP1 can penetrate tissue deeper than GFP.

[0494] Other exemplary viruses include, but are not limited to, LIVP viruses that express one or more therapeutic gene products, such as angiogenesis inhibitors (e.g., GLV-1h81, which contains DNA encoding the plasminogen K5 domain (SEQ ID NO: 30) under the control of the vaccinia synthetic early-late promoter in place of the gusA expression cassette at the HA locus in GLV-1h68; GLV-1h104, GLV-1h105 and GLV-1h106, which contain DNA encoding a truncated human tissue factor fused to the αᵥβ₃-integrin RGD binding motif (tTF-RGD) (SEQ ID NO:31) under the control of a vaccinia synthetic early promoter, vaccinia synthetic early/late promoter or vaccinia synthetic late promoter, respectively, in place of the LacZ/rTFr expression cassette at the TK locus of GLV-1h68; GLV-1h107, GLV-1h108 and GLV-1h109, which contain DNA encoding an anti-VEGF single chain antibody G6 (SEQ ID NO: 29) under the control of a vaccinia synthetic early promoter, vaccinia synthetic early/late promoter or vaccinia synthetic late promoter, respectively, in place of the LacZ/rTFr expression cassette at the TK locus of GLV-1 h68) and proteins for tumor growth suppression (e.g., GLV-1h90, GLV-1h91 and GLV-1h92, which express a fusion protein containing an IL-6 fused to an IL-6 receptor (sIL-6R/IL-6) (SEQ ID NO: 33) under the control of a vaccinia synthetic early promoter, vaccinia synthetic early/late promoter or vaccinia synthetic late promoter, respectively, in place of the gusA expression cassette at the HA locus in GLV-1h68; and GLV-1h96, GLV-1h97 and GLV-1h98, which express IL-24 (melanoma differentiation gene, mda-7; SEQ ID NO: 32) under the control of a vaccinia synthetic early promoter, vaccinia synthetic early/late promoter or vaccinia synthetic late promoter, respectively, in place of the Ruc-GFP fusion gene expression cassette at the F14.5L locus of GLV-1h68). Additional therapeutic gene products that can be engineered in the viruses provided herein also are described elsewhere herein.

[0495] Exemplary transporter proteins that can be encoded by the viruses for in vivo imaging and therapy provided herein include, for example, the human norepinephrine transporter (hNET; SEQ ID NO: 43) and the human sodium iodide symporter (hNIS; SEQ ID NO: 44). Exemplary viruses that can be employed in the methods and use provided herein that encode the human norepinephrine transporter (hNET) include, but are not limited to, GLV-1h99, GLV-1h100, GLV-1h101, GLV-1h139, GLV-1h146, and GLV-1h150. GLV-1h99 encodes hNET under the control of a vaccinia synthetic early promoter in place of the Ruc-GFP fusion gene expression cassette at the F14.5L locus of GLV-1h68. GLV-1h100, GLV-1h101 encode hNET under the control of a vaccinia synthetic early promoter or vaccinia synthetic late promoter, respectively, in place of the LacZ/rTFr expression cassette at the TK locus of GLV-1h68. GLV-1h139 encodes hNET under the control of a vaccinia synthetic early promoter in place of the gusA expression cassette at the HA locus in GLV-1h68. GLV-1h146 and GLV-1 h 150, encode hNET under the control of a vaccinia synthetic early promoter or vaccinia synthetic late promoter, respectively, in place of the LacZ/rTFr expression cassette at the TK locus of GLV-1h100 and GLV-101, respectively. Thus, GLV-1h146 and GLV-1h150 encode hNET and IL-24. Exemplary viruses that can be employed in the methods and use provided herein that encode the human sodium iodide transporter (hNIS) include, but are not limited to, GLV-1h151, GLV-1h152 and GLV-1h153. GLV-1h151, GLV-1h152 and GLV-1h153 encode hNIS under the control of a vaccinia synthetic early promoter, vaccinia synthetic early/late promoter or vaccinia synthetic late promoter, respectively, in place of the gusA expression cassette at the HA locus in GLV-1h68.

[0496] ii. Other Oncolytic Viruses

[0497] Oncolytic viruses for use in the methods provided here are well known to one of skill in the art and include, for example, vesicular stomatitis virus, see, e.g., U.S. Pat. Nos. 7,731,974, 7,153,510, 6,653,103 and U.S. Pat. Pub. Nos. 2010/0178684, 2010/0172877, 2010/0113567, 2007/0098743, 20050260601, 20050220818 and EP Pat. Nos. 1385466, 1606411 and 1520175; herpes simplex virus, see, e.g., U.S. Pat. Nos. 7,897,146, 7731,952, 7,550,296, 7,537,924, 6,723,316, 6,428,968 and U.S. Pat. Pub. Nos. 2011/0177032, 2011/0158948, 2010/0092515, 2009/0274728, 2009/0285860, 2009/0215147, 2009/0010889, 2007/0110720, 2006/0039894 and 20040009604; retroviruses, see, e.g., U.S. Pat. Nos. 6,689,871, 6,635,472, 6,639,139, 5,851,529, 5,716,826, 5,716,613 and U.S. Pat. Pub. No. 20110212530; and adeno-associated viruses, see, e.g., U.S. Pat. Nos. 8,007,780, 7,968,340, 7,943,374, 7,906,111, 7,927,585, 7,811,814, 7,662,627, 7,241,447, 7,238,526, 7,172,893, 7,033,826, 7,001,765, 6,897,045, and 6,632,670.

[0498] Also included are other therapeutic vaccinia viruses, such as the virus designated JX-594, which is a vaccinia virus that expresses GM-CSF described, for example, in U.S. Pat. No. 6,093,700, and the Wyeth strain vaccinia virus designated JX-594, which is a TK-deleted vaccinia virus that expresses GM-CSF (see, International PCT application No WO 2004/014314, U.S. Pat. No. 5,364,773; Mastrangelo et al. (1998) Cancer Gene Therapy 6:409-422; Kim et al. (2006) Molecular Therapeutics 14:361-370).

[0499] In addition, adenoviruses, such as the ONYX viruses and others, have been modified, such as be deletion of EA1 genes, so that they selectively replicate in cancerous cells, and, thus, are oncolytic. Adenoviruses also have been engineered to have modified tropism for tumor therapy and also as gene therapy vectors.

[0500] e. Production and Preparation of Virus

[0501] The viruses for use in the methods provided herein can be formed by standard methodologies well known in the art for producing and/or modifying viruses. Briefly, the methods can include introducing into viruses one or more genetic modifications, followed by screening the viruses for properties reflective of the modification or for other desired properties.

### Methods for Generating Recombinant Virus

[0502] Standard techniques in molecular biology can be used to generate the modified viruses for use in the methods provided herein. Methods for the generation of recombinant viruses using recombinant DNA methods are well known in the art (e.g., see U.S. Pat. Nos. 4,769,330, 4,603,112, 4,722,848, 4,215,051, 5,110,587, 5,174,993, 5,922,576, 6,319,703, 5,719,054, 6,429,001, 6,589,531, 6,573,090, 6,800,288, 7,045,313, He et al. (1998) Proc. Natl. Acad. Sci. USA 95(5): 2509-2514, Racaniello et al. (1981) Science 214:916-919, Hruby et al. (1990) Clin Micro Rev. 3:153-170). Such methods include, but are not limited to, various nucleic acid manipulation techniques, nucleic acid transfer protocols, nucleic acid amplification protocols, and other molecular biology techniques known in the art. For example, point mutations can be introduced into a gene of interest through the use of oligonucleotide mediated site-directed mutagenesis. Alternatively, homologous recombination can be used to introduce a mutation or exogenous sequence into a target sequence of interest. In an alternative mutagenesis protocol, point mutations in a particular gene also can be selected for using a positive selection pressure. See, e.g., Current Techniques in Molecular Biology, (Ed. Ausubel, et al.). Nucleic acid amplification protocols include but are not limited to the polymerase chain reaction (PCR). Use of nucleic acid tools such as plasmids, vectors, promoters and other regulating sequences, are well known in the art for a large variety of viruses and cellular organisms. Nucleic acid transfer protocols include calcium chloride transformation/transfection, electroporation, liposome mediated nucleic acid transfer, N-[1-(2,3-Dioloyloxy)propyl]-N,N,N-trimethylammonium methylsulfate meditated transformation, and others. Further a large variety of nucleic acid tools are available from many different sources including ATCC, and various commercial sources. One skilled in the art will be readily able to select the appropriate tools and methods for genetic modifications of any particular virus according to the knowledge in the art and design choice.

[0503] Any of a variety of modifications can be readily accomplished using standard molecular biological methods known in the art. The modifications will typically be one or more truncations, deletions, mutations or insertions of the viral genome. In one example, the modification can be specifically directed to a particular sequence. The modifications can be directed to any of a variety of regions of the viral genome, including, but not limited to, a regulatory sequence, to a gene-encoding sequence, or to a sequence without a known role. Any of a variety of regions of viral genomes that are available for modification are readily known in the art for many viruses, including the viruses specifically listed herein. As a non-limiting example, the loci of a variety of vaccinia genes provided herein and elsewhere exemplify the number of different regions that can be targeted for modification in the viruses provided herein. In some examples, the modification can be fully or partially random, whereupon selection of any particular modified virus can be determined according to the desired properties of the modified the virus. These methods include, for example, in vitro recombination techniques, synthetic methods and in vivo recombination methods as described, for example, in Sambrook et al. Molecular Cloning: A Laboratory Manual, 2nd edition, Cold Spring Harbor Laboratory Press, cold Spring Harbor N.Y. (1989), and in the Examples disclosed herein.

[0504] The viruses for use in the diagnostic and therapeutic methods provided herein encode a reporter protein, such as, for example, a fluorescent protein, a luminescent protein, a receptor or an enzyme. In some examples, the virus can be modified to express an additional exogenous gene. Exemplary exogenous gene products include proteins and RNA molecules. The modified viruses can express an additional detectable gene product, a therapeutic gene product, a gene product for manufacturing or harvesting, or an antigenic gene product for antibody harvesting. The characteristics of such gene products are described herein and elsewhere. In some examples of modifying an organism to express an exogenous gene, the modification also can contain one or more regulatory sequences to regulate expression of the exogenous gene. As is known in the art, regulatory sequences can permit constitutive expression of the exogenous gene or can permit inducible expression of the exogenous gene. Further, the regulatory sequence can permit control of the level of expression of the exogenous gene. In some examples, inducible expression can be under the control of cellular or other factors present in a tumor cell or present in a virus-infected tumor cell. In other examples, inducible expression can be under the control of an administrable substance, including IPTG, RU486 or other known induction compounds. Any of a variety of regulatory sequences are available to one skilled in the art and can be selected according to known factors and design preferences. In some examples, such as gene product manufacture and harvesting, the regulatory sequence can result in constitutive, high levels of gene expression. In some examples, such as anti-(gene product) antibody harvesting, the regulatory sequence can result in constitutive, lower levels of gene expression. In tumor therapy examples, a therapeutic protein can be under the control of an internally inducible promoter or an externally inducible promoter.

[0505] In other examples, organ or tissue-specific expression can be controlled by regulatory sequences. In order to achieve expression only in the target organ, for example, a tumor, the foreign nucleotide sequence can be linked to a tissue specific promoter and used for gene therapy. Such promoters are well known to those skilled in the art (see e.g., Zimmermann et al. (1994) Neuron 12:11-24; Vidal et al. (1990) EMBO J. 9:833-840; Mayford et al. (1995) Cell 81: 891-904; and Pinkert et al. (1987) Genes & Dev. 1:268-276).

[0506] In some examples, the viruses can be modified to express two or more proteins, where any combination of the two or more proteins can be one or more detectable gene products, therapeutic gene products, gene products for manufacturing or harvesting or antigenic gene products for antibody harvesting. In one example, a virus can be modified to express a detectable protein and a therapeutic protein. In another example, a virus can be modified to express two or more gene products for detection or two or more therapeutic gene products. For example, one or more proteins involved in biosynthesis of a luciferase substrate can be expressed along with luciferase. When two or more exogenous genes are introduced, the genes can be regulated under the same or different regulatory sequences, and the genes can be inserted in the same or different regions of the viral genome, in a single or a plurality of genetic manipulation steps. In some examples, one gene, such as a gene encoding a detectable gene product, can be under the control of a constitutive promoter, while a second gene, such as a gene encoding a therapeutic gene product, can be under the control of an inducible promoter. Methods for inserting two or more genes into a virus are known in the art and can be readily performed for a wide variety of viruses using a wide variety of exogenous genes, regulatory sequences, and/or other nucleic acid sequences.

[0507] Methods of producing recombinant viruses are known in the art (Falkner F G & Moss B (1990) J Virol 64(6):3108-3111). Provided herein for exemplary purposes are methods of producing a recombinant vaccinia virus. A recombinant vaccinia virus with an insertion in the F14.5L gene (NotI site of LIVP) can be prepared by the following steps: (a) generating (i) a vaccinia shuttle plasmid containing the modified F14.5L gene inserted at restriction site X and (ii) a dephosphorylated wt VV (VGL) DNA digested at restriction site X; (b) transfecting host cells infected with PUV-inactivated helper VV (VGL) with a mixture of the constructs of (i) and (ii) of step a; and (c) isolating the recombinant vaccinia viruses from the transfectants. One skilled in the art knows how to perform such methods, for example by following the instructions given in U.S. Pat. Nos. 7,588,7667 and 7,588,771; see also Timiryasova et al. (2001) Biotechniques 31:534-540. In one example, restriction site X is a unique restriction site.

[0508] A variety of suitable host cells also are known to the person skilled in the art and include many mammalian, avian and insect cells and tissues which are susceptible for vaccinia virus infection, including chicken embryo, rabbit, hamster and monkey kidney cells, for example, HeLa cells, RK13, CV-1, Vero, BSC40 and BSC-1 monkey kidney cells.

[0509] 6. Antibodies for Capture of Virally-Infected Tumor Cells

[0510] Any antibody that binds to a virally encoded protein can be used in the methods provided herein. The antibodies provided herein can bind to any protein described herein that is virally encoded. The antibody can bind to a virally encoded membrane protein, such as a receptor protein or transporter protein. One of skill in the art can readily identify such antibodies and can adapt them for the methods described herein for detection and enumeration of CTCs. In particular examples, the antibodies used herein are antibodies that bind to a virally encoded NIS protein.

[0511] The antibodies and antigen-binding fragments thereof, provided herein that can bind a virally encoded protein described herein or known to one of skill in the art, such as a virally encoded membrane protein, can have an amino acid sequence that resembles a mammalian antibody light or heavy chain. For example, a polypeptide can have additional amino acid residues C-terminal to the CDR and framework sequences. The additional residues can form a sequence resembling that of the constant region of the light or heavy chain of a human or other mammalian antibody. Mammalian antibody constant regions are known in the art. Examples of mammalian constant region sequences are described in Kabat et al., Sequences of proteins of immunological interest edn 5th: National Institutes of Health Publication No. 91-3242 (1991).

[0512] Thus, the C-terminal segment of an antibody or antibody fragment provided herein can have one or more than one immunoglobulin domains as is typically present in the light and heavy chain constant regions of human or other mammalian antibodies. The constant region of a mammalian antibody light chain typically has one immunoglobulin domain, while the constant region of a mammalian antibody heavy chain typically has three or four immunoglobulin domains. The antibody also can have one or more than one cysteine residues that allow for formation of intra-chain disulfide bond between amino acid residues within the antibody or fragment thereof or for formation of inter-chain disulfide bonds between two antibodies or fragments thereof. Further, the antibody or antibody fragment can have a region that resembles the hinge region of a mammalian antibody heavy chain. The hinge region, when present in an antibody provided herein, is located between the first and second immunoglobulin domains and can have from 10 to over 60 amino acid residues. A portion of the hinge region can adopt a random and flexible conformation allowing for molecular motion.

[0513] In instances where the constant region is included in the antibodies that bind a virally encoded protein, the constant region can have an amino acid sequence of a contant region of any of the immunoglobulin classes. The constant region can be from the light chain or heavy chain, including any known in the art. Exemplary Fab′ human consensus constant region sequences include, for example, those provided within the genebank of the National Center for Biotechnology Information. Typically, the antibody contains a constant region from an IgG immunoglobulin, such IgG1, IgG2, IgG3 or IgG4.

[0514] Included among such antibodies are full length antibodies, or antigen-binding fragments thereof, including, for example, scFv, Fab, Fab′, F(ab′)₂, Fv, dsFv, diabody, Fd, or Fd′ fragments. The antibodies or antigen-binding fragments thereof can selectively bind to a virally encoded protein. In some examples, the antibodies or antigen-binding fragments thereof bind to NIS. For example, the antibodies can bind to hNIS. In some examples, the antibodies or antigen-binding fragments thereof selectively bind to NIS (or hNIS) expressed on the surface of a CTC. Also included are antibodies that bind to the same epitope as any of the antibodies described herein.

[0515] a. General Structure of Antibodies

[0516] Native antibodies are usually heterotetrameric glycoproteins of about 150,000 daltons, composed of two identical light (L) chains and two identical heavy (H) chains. Each light chain is linked to a heavy chain by one covalent disulfide bond, while the number of disulfide linkages varies between the heavy chains of different immunoglobulin isotypes. Each heavy and light chain also has regularly spaced intrachain disulfide bridges. Each heavy chain has at one end a variable region (V_{H}) followed by a number of constant regions. Each light chain has a variable region at one end (V_{L}) and a constant region at its other end. The constant region of the light chain is aligned with the first constant region of the heavy chain, and the light chain variable region is aligned with the variable region of the heavy chain. The variable region of either chain has a triplet of hypervariable or complementarity determining regions (CDR's) spaced within a framework sequence as explained below. The framework and constant regions of the antibody have highly conserved amino acid sequences such that a species consensus sequence may typically be available for the framework and constant regions. Particular amino acid residues are believed to form an interface between the light and heavy chain variable regions (Chothia et al., (1985) J. Mol. Biol. 186:651-63; Novotny and Haber, (1985) Proc. Nail. Acad. Sci. USA 82:4592-4596). Antibodies are produced naturally by B cells in membrane-bound and secreted forms. Antibodies specifically recognize and bind antigen epitopes through cognate interactions. Antibody binding to cognate antigens can initiate multiple effector functions, which cause neutralization and clearance of toxins, pathogens and other infectious agents.

[0517] Diversity in antibody specificity arises naturally due to recombination events during B cell development. Through these events, various combinations of multiple antibody V, D and J gene segments, which encode variable regions of antibody molecules, are joined with constant region genes to generate a natural antibody repertoire with large numbers of diverse antibodies. A human antibody repertoire contains more than 10¹⁰ different antigen specificities and thus theoretically can specifically recognize any foreign antigen. Antibodies include such naturally produced antibodies, as well as synthetically, i.e. recombinantly, produced antibodies, such as antibody fragments, including the anti-NIS antibodies or antigen-binding fragments provided herein.

[0518] In folded antibody polypeptides, binding specificity is conferred by antigen-binding site domains, which contain portions of heavy and/or light chain variable region domains. Other domains on the antibody molecule serve effector functions by participating in events such as signal transduction and interaction with other cells, polypeptides and biomolecules. These effector functions cause neutralization and/or clearance of the infecting agent recognized by the antibody. Domains of antibody polypeptides can be varied according to the methods herein to alter specific properties.

[0519] i. Structural and Functional Domains of Antibodies

[0520] Full-length antibodies contain multiple chains, domains and regions. A full length conventional antibody contains two heavy chains and two light chains, each of which contains a plurality of immunoglobulin (Ig) domains. An Ig domain is characterized by a structure called the Ig fold, which contains two beta-pleated sheets, each containing anti-parallel beta strands connected by loops. The two beta sheets in the Ig fold are sandwiched together by hydrophobic interactions and a conserved intra-chain disulfide bond. The Ig domains in the antibody chains are variable (V) and constant (C) region domains. Each heavy chain is linked to a light chain by a disulfide bond, and the two heavy chains are linked to each other by disulfide bonds. Linkage of the heavy chains is mediated by a flexible region of the heavy chain, known as the hinge region.

[0521] Each full-length conventional antibody light chain contains one variable region domain (V_{L}) and one constant region domain (C_{L}). Each full-length conventional heavy chain contains one variable region domain (V_{H}) and three or four constant region domains (C_{H}) and, in some cases, hinge region. Owing to recombination events discussed above, nucleic acid sequences encoding the variable region domains differ among antibodies and confer antigen-specificity to a particular antibody. The constant regions, on the other hand, are encoded by sequences that are more conserved among antibodies. These domains confer functional properties to antibodies, for example, the ability to interact with cells of the immune system and serum proteins in order to cause clearance of infectious agents. Different classes of antibodies, for example IgM, IgD, IgG, IgE and IgA, have different constant regions, allowing them to serve distinct effector functions.

[0522] Each variable region domain contains three portions called complementarity determining regions (CDRs) or hypervariable (HV) regions, which are encoded by highly variable nucleic acid sequences. The CDRs are located within the loops connecting the beta sheets of the variable region Ig domain. Together, the three heavy chain CDRs (CDR1, CDR2 and CDR3) and three light chain CDRs (CDR1, CDR2 and CDR3) make up a conventional antigen-binding site (antibody combining site) of the antibody, which physically interacts with cognate antigen and provides the specificity of the antibody. A whole antibody contains two identical antibody combining sites, each made up of CDRs from one heavy and one light chain. Because they are contained within the loops connecting the beta strands, the three CDRs are non-contiguous along the linear amino acid sequence of the variable region. Upon folding of the antibody polypeptide, the CDR loops are in close proximity, making up the antigen combining site. The beta sheets of the variable region domains form the framework regions (FRs), which contain more conserved sequences that are important for other properties of the antibody, for example, stability.

[0523] ii. Antibody Fragments

[0524] Antibodies provided herein include antibody fragments, which are derivatives of full-length antibodies that contain less than the full sequence of the full-length antibodies but retain at least a portion of the specific binding abilities of the full-length antibody. The antibody fragments also can include antigen-binding portions of an antibody that can be inserted into an antibody framework (e.g., chimeric antibodies) in order to retain the binding affinity of the parent antibody. Examples of antibody fragments include, but are not limited to, Fab, Fab′, F(ab′)₂, single-chain Fvs (scFv), Fv, dsFv, diabody, Fd and Fd′ fragments, and other fragments, including modified fragments (see, for example, Methods in Molecular Biology, Vol 207: Recombinant Antibodies for Cancer Therapy Methods and Protocols (2003); Chapter 1; p 3-25, Kipriyanov). Antibody fragments can include multiple chains linked together, such as by disulfide bridges and can be produced recombinantly. Antibody fragments also can contain synthetic linkers, such as peptide linkers, to link two or more domains. Methods for generating antigen-binding fragments are well-known in the art and can be used to modify any antibody provided herein. Fragments of antibody molecules can be generated, such as for example, by enzymatic cleavage. For example, upon protease cleavage by papain, a dimer of the heavy chain constant regions, the Fc domain, is cleaved from the two Fab regions (i.e. the portions containing the variable regions).

[0525] Single chain antibodies can be recombinantly engineered by joining a heavy chain variable region (V_{H}) and light chain variable region (V_{L}) of a specific antibody. The particular nucleic acid sequences for the variable regions can be cloned by standard molecular biology methods, such as, for example, by polymerase chain reaction (PCR) and other recombination nucleic acid technologies. Methods for producing sFvs are described, for example, by Whitlow and Filpula (1991) Methods, 2: 97-105; Bird et al. (1988) Science 242:423-426; Pack et al. (1993) Bio/Technology 11:1271-77; and U.S. Pat. Nos. 4,946,778, 5,840,300, 5,667,988, 5,658,727 and 5,258,498). Single chain antibodies also can be identified by screening single chain antibody libraries for binding to a target antigen. Methods for the construction and screening of such libraries are well-known in the art.

[0526] The antibodies or antigen-binding fragment thereof provided include polyclonal antibodies, monoclonal antibodies, multispecific antibodies, bispecific antibodies, human antibodies, humanized antibodies, camelised antibodies, chimeric antibodies, single-chain Fvs (scFv), single chain antibodies, single domain antibodies, Fab fragments, F(ab′) fragments, disulfide-linked Fvs (sdFv), and anti-idiotypic (anti-Id) antibodies, intrabodies, or antigen-binding fragments of any of the above. In particular, antibodies include immunoglobulin molecules and immunologically active fragments of immunoglobulin molecules, i.e., molecules that contain an antigen-binding site. Immunoglobulin molecules can be of any type (e.g., IgG, IgE, IgM, IgD, IgA and IgY), class (e.g., IgG1, IgG2, IgG3, IgG4, IgA1 and IgA2) or subclass.

[0527] The antibodies or antigen-binding fragments thereof provided herein can contain any constant region known in the art, such as any human constant region known in the art, including, but not limited to, human light chain kappa (κ), human light chain lambda (λ), the constant region of IgG1, the constant region of IgG2, the constant region of IgG3 or the constant region of IgG4.

[0528] Also included in the antibodies and antigen-binding fragments provided herein are those that bind to an epitope in the extracellular region of hNIS. For example, also included are antibodies and antigen-binding fragments that bind to an epitope located within amino acids 208-241 of hNIS (RGVMLVGGPRQVLTLAQNHSRINLMDFNPDPRSR (SEQ ID NO: 50)). Also included are antibodies and antigen-binding fragments that bind to an epitope located within amino acids 466-525 of hNIS (YPPSEQTMRVLPSSAARCVALSVNASGLLDPALLPANDSSRAPSSGMDASRPALADS FYA (SEQ ID NO: 51)). In some examples, the antibodies and antigen binding fragments provided herein bind to an epitope located within amino acids 225-238 of hNIS ((NHSRINLMDFNPDP (SEQ ID NO: 52)), amino acids 468-481 of hNIS (PSEQTMRVLPSSAA (SEQ ID NO: 54)); or amino acids 502-515 of hNIS (NDSSRAPSSGMDAS, SEQ ID NO: 53)).

[0529] b. Additional Modifications of Antibodies

[0530] The antibodies and fragments thereof provided herein can be modified by the attachment of a heterologous peptide to facilitate purification. Generally such peptides are expressed as a fusion protein containing the antibody fused to the peptide at the C- or N-terminus of the antibody or antigen-binding fragment thereof. Exemplary peptides commonly used for purification include, but are not limited to, hexa-histidine peptides, hemagglutinin (HA) peptides, and flag tag peptides (see e.g., Wilson et al. (1984) Cell 37:767; Witzgall et al. (1994) Anal Biochem 223(2):291-298). The fusion does not necessarily need to be direct, but can occur through a linker peptide. In some examples, the linker peptide contains a protease cleavage site which allows for removal of the purification peptide following purification by cleavage with a protease that specifically recognizes the protease cleavage site.

[0531] The antibodies or antigen-binding fragments thereof can also be attached to solid supports, which are useful for immunomagnetic capture of CTCs. Exemplary solid supports include, but are not limited to, glass, cellulose, polyacrylamide, nylon, polystyrene, polyvinyl chloride, polypropylene or magnetic beads.

[0532] i. PEGylation

[0533] The antibodies or antigen-binding fragments thereof provided herein can be conjugated to polymer molecules such as high molecular weight polyethylene glycol (PEG) to increase half-life and/or improve their pharmacokinetic profiles. Conjugation can be carried out by techniques known to those skilled in the art. Conjugation of therapeutic antibodies with PEG has been shown to enhance pharmacodynamics while not interfering with function (see, e.g., Deckert et al., Int. J. Cancer 87:382-390, 2000; Knight et al., Platelets 15:409-418, 2004; Leong et al., Cytokine 16:106-119, 2001; and Yang et al., Protein Eng. 16:761-770, 2003). PEG can be attached to the antibodies or antigen-binding fragments with or without a multifunctional linker either through site-specific conjugation of the PEG to the N- or C-terminus of the antibodies or antigen-binding fragments or via epsilon-amino groups present on lysine residues. Linear or branched polymer derivatization that results in minimal loss of biological activity can be used. The degree of conjugation can be monitored by SDS-PAGE and mass spectrometry to ensure proper conjugation of PEG molecules to the antibodies.

[0534] Unreacted PEG can be separated from antibody-PEG conjugates by, e.g., size exclusion or ion-exchange chromatography. PEG-derivatized antibodies or antigen-binding fragments thereof can be tested for binding activity to antigens as well as for in vivo efficacy using methods known to those skilled in the art, for example, by immunoassays described herein.

[0535] c. Methods for Producing Antibodies

[0536] The antibodies or antigen-binding fragments thereof provided herein can be generated by any suitable method known in the art for the preparation of antibodies, including chemical synthesis and recombinant expression techniques. Various combinations of host cells and vectors can be used to receive, maintain, reproduce and amplify nucleic acids (e.g. nucleic acids encoding antibodies such as antibodies or antigen-binding fragments thereof provided that bind to virally encoded genes), and to express polypeptides encoded by the nucleic acids. In general, the choice of host cell and vector depends on whether amplification, polypeptide expression, and/or display on a genetic package, such as a phage, is desired. Methods for transforming host cells are well known. Any known transformation method (e.g., transformation, transfection, infection, electroporation and sonoporation) can be used to transform the host cell with nucleic acids. Procedures for the production of antibodies, such as monoclonal antibodies and antibody fragments, such as, but not limited to, Fab fragments and single chain antibodies are well known in the art.

[0537] Antibodies may be produced using techniques well known to those of skill in the art and disclosed in, for example, U.S. Pat. Nos. 4,011,308; 4,722, 890; 4,016,043; 3,876,504; 3,770,380; and 4,372,745. See also Antibodies-A Laboratory Manual, Harlow and Lane, eds., Cold Spring Harbor Laboratory, N.Y. (1988). For example, polyclonal antibodies are generated by immunizing a suitable animal, such as a mouse, rat, rabbit, sheep, or goat, with an antigen of interest. In order to enhance immunogenicity, the antigen can be linked to a carrier prior to immunization. Such carriers are well known to those of ordinary skill in the art. Immunization is generally performed by mixing or emulsifying the antigen in saline, preferably in an adjuvant such as Freund's complete adjuvant, and injecting the mixture or emulsion parenterally (generally subcutaneously or intramuscularly). The animal is generally boosted 2-6 weeks later with one or more injections of the antigen in saline, preferably using Freund's incomplete adjuvant. Antibodies may also be generated by in vitro immunization, using methods known in the art. Polyclonal antiserum is then obtained from the immunized animal.

[0538] Monoclonal antibodies can be prepared using a wide variety of techniques known in the art including, but not limited to, the use of hybridoma, recombinant expression, phage display technologies or a combination thereof. For example, monoclonal antibodies can be produced using hybridoma techniques including those known in the art and taught for example in Harlow et al. Antibodies: A Laboratory Manual (Cold Spring Harbor Laboratory Press, 2nd ed. 1988); Hammerling, Monoclonal Antibodies and T-Cell Hybridomas 5630681 (Elsevier N.Y. 1981).

[0539] The antibodies or fragments thereof provided herein, can be produced by any method known to those of skill in the art including in vivo and in vitro methods. Desired polypeptides can be expressed in any organism suitable to produce the required amounts and forms of the proteins, such as for example, needed for analysis, administration and treatment. Expression hosts include prokaryotic and eukaryotic organisms such as E. coli, yeast, plants, insect cells, mammalian cells, including human cell lines and transgenic animals (e.g., rabbits, mice, rats, and livestock, such as, but not limited to, goats, sheep, and cattle), including production in serum, milk and eggs. Expression hosts can differ in their protein production levels as well as the types of post-translational modifications that are present on the expressed proteins. The choice of expression host can be made based on these and other factors, such as regulatory and safety considerations, production costs and the need and methods for purification.

[0540] i. Nucleic Acids

[0541] Provided herein are isolated nucleic acid molecules encoding a polypeptide described above, that, alone or in combination with another polypeptide, can bind a virally encoded gene. These nucleic acids can be inserted into an expression cassette or expression vector such that they are operably linked to expression control sequences.

[0542] Nucleic acid molecules encoding the antibodies or antigen-binding fragments thereof provided herein can be prepared using well-known recombinant techniques for manipulation of nucleic acid molecules (see, e.g., techniques described in Sambrook et al. (1990) Molecular Cloning, A Laboratory Manual, 2d Ed., Cold Spring Harbor Laboratory, Cold Spring Harbor, N.Y. and Ausubel et al., eds. (1998) Current Protocols in Molecular Biology, John Wiley & Sons, NY). In some examples, methods, such as, but not limited to, recombinant DNA techniques, site directed mutagenesis, and polymerase chain reaction (PCR) can be used to generate modified antibodies or antigen-binding fragments thereof having a different amino acid sequence, for example, to create amino acid substitutions, deletions, and/or insertions.

[0543] Polypeptides and antibodies also can be produced by recombinant expression. First, nucleic acids encoding these polypeptides and antibodies can be constructed by switching the regions of these molecules that encode the CDR and/or framework sequences. In particular, the nucleic acid encoding a first polypeptide can be modified by insertion or replacement of nucleic acid regions encoding, for example, a CDR region, a framework region or a constant region, from another nucleic acid encoding a second polypeptide using known recombinant techniques.

[0544] Nucleic acids encoding selected CDR and framework sequences can be joined by splicing using overlapping extension PCR, and the resulting nucleic acid inserted into an expression vector for expression in a bacterial or mammalian host cell as described below. See, for example, Horton et al., Biotechniques 8:528-535 (1990). Nucleic acid sequences encoding constant regions of the light and heavy chains of human and other mammalian antibodies are known in the art and can be obtained from the public databases such as Genbank. Examples of nucleic acid sequences encoding constant regions are also described in Kabat et al., Sequences of Proteins of Immunological Interest, 5^{th} Edition, National Institutes of Health Publication No. 91-3242 (1991). See the Cold Spring Harbor Laboratory Manuals cited below for the details involved in DNA sequence engineering. Nucleic acid sequences encoding individual CDR and framework sequences also can be synthesized using known techniques such as, for example, solid phase synthesis. Polypeptides also can be produced through synthetic methods well-known in the art (Merrifield, Science, 85:2149 (1963)).

[0545] ii. Purification

[0546] Methods for purification of polypeptides, including the antibodies or antigen-binding fragments thereof provided, from host cells will depend on the chosen host cells and expression systems. For secreted molecules, proteins generally are purified from the culture media after removing the cells. For intracellular expression, cells can be lysed and the proteins purified from the extract. In one example, polypeptides are isolated from the host cells by centrifugation and cell lysis (e.g. by repeated freeze-thaw in a dry ice/ethanol bath), followed by centrifugation and retention of the supernatant containing the polypeptides. When transgenic organisms such as transgenic plants and animals are used for expression, tissues or organs can be used as starting material to make a lysed cell extract. Additionally, transgenic animal production can include the production of polypeptides in milk or eggs, which can be collected, and if necessary the proteins can be extracted and further purified using standard methods in the art.

[0547] The antibodies or antigen-binding fragments thereof provided, can be purified, for example, from lysed cell extracts, using standard protein purification techniques known in the art including but not limited to, SDS-PAGE, size fraction and size exclusion chromatography, ammonium sulfate precipitation and ionic exchange chromatography, such as anion exchange. Affinity purification techniques also can be utilized to improve the efficiency and purity of the preparations. For example, antibodies, receptors and other molecules that bind proteases can be used in affinity purification. Expression constructs also can be engineered to add an affinity tag to a protein such as a myc epitope, GST fusion or His₆ and affinity purified with myc antibody, glutathione resin and Ni-resin, respectively. Purity can be assessed by any method known in the art including gel electrophoresis and staining and spectrophotometric techniques.

[0548] The isolated polypeptides then can be analyzed, for example, by separation on a gel (e.g. SDS-Page gel), size fractionation (e.g. separation on a Sephacryl™ S-200 HiPrep™ 16×60 size exclusion column (Amersham from GE Healthcare Life Sciences, Piscataway, N.J.). Isolated polypeptides also can be analyzed in binding assays, typically binding assays using a binding partner bound to a solid support, for example, to a plate (e.g. ELISA-based binding assays) or a bead, to determine their ability to bind desired binding partners. The binding assays described in the sections below, which are used to assess binding of precipitated phage displaying the polypeptides, also can be used to assess polypeptides isolated directly from host cell lysates. For example, binding assays can be carried out to determine whether antibody polypeptides bind to one or more antigens, for example, by coating the antigen on a solid support, such as a well of an assay plate and incubating the isolated polypeptides on the solid support, followed by washing and detection with secondary reagents, e.g. enzyme-labeled antibodies and substrates.

[0549] 7. Applications of the Method

[0550] The methods provided herein for the detection and enumeration of CTCs can be employed for a variety of applications including, but not limited to, cancer detection, cancer diagnosis, identification of subjects for oncolytic therapy or other anticancer therapies, staging of cancers, prognosis, monitoring cancer progression, stabilization and regression, monitoring an anti-cancer therapy, such as an oncolytic virus therapy, and monitoring subjects for cancer recurrence following surgery or remission. Further applications include, but are not limited to, detection of residual tumor cells in the bone marrow of patients undergoing high-dose radiotherapy. The detection methods also can be employed in the development and evaluation of new cancer therapies, such as oncolytic virus, vaccine or gene therapies. In some examples, a threshold level of CTCs is used to establish where a sample is considered positive for the particular condition above the threshold value.

[0551] In some examples, the methods provided herein for detection and enumeration of CTCs can be used for monitoring efficacy of treatment with an oncolytic virus. For example, an oncolytic reporter virus can be administered to the subject having a tumor, where detection of one or more infected CTCs in a body fluid sample from the subject using the methods provided herein is indicative that treatment with the virus is or will be efficacious. In some examples, the virus can be administered at or about a dosage of 1×10² pfu, 1×10³ pfu, 1×10⁴ pfu, 1×10⁵ pfu, 1×10⁶ pfu, 1×10⁷ pfu or 1×10⁸ pfu. Typically the virus is administered at a dosage that is lower than the dosage that is typically administered for treatment.

[0552] In some examples, the methods provided herein for detection and enumeration of CTCs can be used for determining a cancer prognosis. For example, an increase in the level of CTCs detected relative to a control sample is indicative of a poor prognosis. In other examples, a decrease in the level of CTCs detected relative to a control sample is indicative of a favorable prognosis. In some examples, a prognosis is determined by comparing the level of CTCs detected to a control or reference sample or database of values corresponding to a known prognosis. A prognosis can be determined based on whether the level of CTCs detected is at or above a threshold level. In some examples, the level of CTCs in a particular subject is monitored over time by performing a CTC detection method provided herein at consecutive predetermined time points. In such examples, an increase in the level of CTCs detected between two successive time points is indicative of a poor prognosis and a decrease in the level of CTCs detected between two successive time points is indicative of a favorable prognosis.

[0553] In some examples, the methods provided herein for detection and enumeration of CTCs can be used for determining whether a subject has a metastasizing tumor. In some examples, detection of one or more CTCs in a subject using the methods provided herein is indicative that the subject has a metastasizing tumor.

[0554] In some examples, the methods provided herein for detection and enumeration of CTCs can be used for evaluating the risk in a subject for the development of a metastatic tumor. In some examples, detection of one or more CTCs in a subject using the methods provided herein is indicative that the subject is at risk for developing a metastatic tumor. In some examples, the subject has a tumor, such as a metastatic tumor, is at risk of having a tumor, or is in remission following cancer treatment.

[0555] In some examples, the methods provided herein for detection and enumeration of CTCs can be used for staging of cancer or assessing the severity of disease. For example, detection and enumeration of CTCs using the methods provided can be compared to a control or reference or database of values that correlates a particular level of CTCs with a particular stage of cancer. If the level of CTCs detected in the sample is at or above a particular threshold level, it indicates that the cancer is at or has advanced past the particular stage associated with the threshold level of CTCs. If the level of CTCs detected in the sample is lower than a particular threshold level, it indicates that the cancer has not advanced past the particular stage associated with the threshold level of CTCs.

[0556] In some examples, the methods provided herein for detection and enumeration of CTCs can be used for monitoring the progression of cancer. The level of CTCs in a particular subject can be monitored over time by performing a CTC detection method provided herein at consecutive predetermined time points. In some examples, an increase in the level of CTCs detected between two successive time points is indicative of cancer progression. In some examples, a decrease in the level of CTCs detected between two successive time points is indicative that the cancer is not advancing or is in regression/remission. In some examples, no difference in the level of CTCs detected between two successive time points is indicative of arrest or stability in the progression of the cancer.

[0557] In exemplary methods, where the level of CTCs are compared at two successive time points, the level of CTCs are detected at a first time point and the level of CTC are detected at a second time point 6 hours, 7 hours, 8 hours, 9 hours, 10 hours, 11 hours, 12 hours, 13 hours, 14 hours, 15 hours, 16 hours, 17 hours, 18 hours, 19 hours, 20 hours, 21 hours, 22 hours, 23 hours, 1 day, 2 days, 3 days, 4 days, 5 days, 6 days, 7 days, 8 days, 9 days, 10 days, 11 days, 12 days, 13 days, 14 days, 15 days, 16 days, 17 days, 18 days, 19 days, 20 days, 3 weeks, 4 weeks, 5 weeks, 6 weeks, 7 weeks, 8 weeks, 9 weeks, 10 weeks, 11 weeks, 12 weeks, 13 weeks, 14 weeks, 15 weeks, 16 weeks, 17 weeks, 18 weeks, 19 weeks, 20 weeks, or later following the first time point. In some examples, the level of CTCs is detected at multiple time points, such as, for example, 2, 3, 4, 5, 6, 7, 8, 9, 10, 15, 20 or more time points.

[0558] In exemplary methods, where the level of CTCs in a sample from a subject are compared at two successive time points, the level of CTCs are detected in a first sample collected at a first time point and the level of CTC are detected in a second sample 6 hours, 7 hours, 8 hours, 9 hours, 10 hours, 11 hours, 12 hours, 13 hours, 14 hours, 15 hours, 16 hours, 17 hours, 18 hours, 19 hours, 20 hours, 21 hours, 22 hours, 23 hours, 1 day, 2 days, 3 days, 4 days, 5 days, 6 days, 7 days, 8 days, 9 days, 10 days, 11 days, 12 days, 13 days, 14 days, 15 days, 16 days, 17 days, 18 days, 19 days, 20 days, 3 weeks, 4 weeks, 5 weeks, 6 weeks, 7 weeks, 8 weeks, 9 weeks, 10 weeks, 11 weeks, 12 weeks, 13 weeks, 14 weeks, 15 weeks, 16 weeks, 17 weeks, 18 weeks, 19 weeks, 20 weeks, or later following the collection of the first sample. In some examples, the level of CTCs is detected multiple sample collected at multiple time points, such as, for example, 2, 3, 4, 5, 6, 7, 8, 9, 10, 15, 20 or more time points.

[0559] Generally, in examples where the level of CTCs in two samples are compared to determine an increase or decrease in the level of CTCs, the samples are of the same type and collected in the same manner (i.e. using the same or similar procedures). For example, the level of CTCs in a first blood sample is typically compared to the level of CTCs in a second blood sample.

[0560] In some examples, the methods provided herein for detection and enumeration of CTCs can be used for monitoring an anti-cancer therapy or determining the efficacy of an anti-cancer therapy. In some examples, an increase in the level of CTCs detected relative to a control sample is indicative that the anti-cancer therapy is not effective for treatment of the cancer. In some examples, a decrease in the level of CTCs detected relative to a control sample is indicative that the anti-cancer therapy is effective for treatment of the cancer.

[0561] The methods for detecting the level of CTCs can be performed before, during or after the patient has undergone one or more rounds of anti-cancer therapy, such as therapy with a chemotherapeutic agent or oncolytic viral therapy. The results obtained with the methods can provide a measure of the therapeutic efficacy of an anti-cancer agent or combinations of anti-cancer agents against particular tumors or different types of tumors. The results can therefore be used to aid in the design of an appropriate therapy protocol, or to monitor the predicted effectiveness of a current protocol. Serial monitoring of CTCs can direct treatment selection during therapy, allow the clinician to make informed decisions about continued or alternative therapies and reduce the cost of drug treatments by eliminating ineffective therapies early in treatment. For example, detection of CTCs or a particular level of CTCs in a body sample can indicate that the treatment should be increased, decreased, accelerated or discontinued. Such changes include, for example, changes in treatment regimen, including, but not limited to a increase or decrease in the frequency of administration, an increase or decrease in the amount of the anticancer agent administered, or the addition or subtraction of anticancer therapies from the regimen. In some examples, where the anticancer agent is an oncolytic virus, a change in the treatment regimen can include an increase or decrease in the frequency of administration, an increase or decrease in the amount of the oncolytic virus administered, or the addition or subtraction of one or more additional anticancer therapies from the regimen, such as the addition of an additional oncolytic virus or a chemotherapeutic agent.

[0562] In some examples, the methods are employed for the monitoring of a single anti-cancer therapy. In some examples, the methods are employed for the monitoring of a combination of two or more anti-cancer therapies. Exemplary anti-cancer therapies for monitoring are provided elsewhere herein and include, but are not limited to, radiation, chemotherapy, gene therapy, and treatment with therapeutic viruses.

[0563] In some examples, the methods provided herein for detection and enumeration of CTCs can thus be used for stratification of subjects for anti-cancer therapy. For example, a subject can be selected for anti-cancer therapy if one or more CTCs are detected in the sample. In some examples, a subject can be selected for treatment with an anti-metastatic agent. As described herein, the oncolytic viruses, including vaccinia viruses, that are administered to a subject with a metastatic cancer preferentially infect metastasizing cells of the tumor and colonize newly formed metastases, and also clear circulating tumor cells from the subject. Accordingly, a subject can be selected for anti-cancer therapy with an oncolytic virus, for example, an LIVP vaccinia virus, if one or more CTCs are detected in the sample.

[0564] Thus, the diagnostic methods can be used in combination with a method for treatment of a cancer where the method involves detection of CTC in a sample from a subject and, if CTCs are detected, administering to the subject an effective amount of an anti-cancer therapy, such as an oncolytic virus, for example, an LIVP vaccinia virus, for the treatment of the metastasis. In some examples, the subject is administered an oncolytic reporter virus and the infected CTCs are detected in a sample from the subject using the methods provided herein. In other examples, a sample is obtained from a subject and infected with the oncolytic reporter virus for the detection of CTCs using the methods provided herein.

[0565] Surgical removal of cancer is most successful when the cancer is detected early and is confined to the primary tumor site. If metastasis has already occurred prior to surgery, then a subject is at a higher risk of relapse and subsequent tumor growth. Treatment of subjects either prior to or following surgery to excise the primary tumor can aid in the clearance of metastatic cells that have detached from the tumor. Clearance of the metastases can lower the risk of additional tumor growth. Accordingly, provided herein are methods of treatment of a cancer where the method involves detection of CTC in a sample from a subject and, if CTCs are detected, administering to the subject an effective amount of an oncolytic virus for the treatment of the metastasis where once the metastasis is treated, the primary tumor is removed. In some examples, the subject is administered an oncolytic reporter virus and the infected CTCs are detected in a sample from the subject using the methods provided herein. In other examples, a sample is obtained from a subject and infected with the oncolytic reporter virus for the detection of CTCs using the methods provided herein. After removal of the primary tumor, the patient can undergo regular checks for recurrence and be immediately treated if there is a positive finding.

[0566] As one skilled in the art will recognize, the time period for effective treatment with an anti-cancer agent will vary. For example, the time period for infection of a virus will vary depending on the virus, the organ(s) or tissue(s), the immunocompetence of the host and dosage of the virus. Such times can be empirically determined if necessary.

[0567] The methods provided herein for detecting and enumerating CTCs can be used to monitor the treatment of cancers and tumors, such as, but not limited to, acute lymphoblastic leukemia, acute lymphoblastic leukemia, acute myeloid leukemia, acute promyelocytic leukemia, adenocarcinoma, adenoma, adrenal cancer, adrenocortical carcinoma, AIDS-related cancer, AIDS-related lymphoma, anal cancer, appendix cancer, astrocytoma, basal cell carcinoma, bile duct cancer, bladder cancer, bone cancer, osteosarcoma/malignant fibrous histiocytoma, brainstem glioma, brain cancer, carcinoma, cerebellar astrocytoma, cerebral astrocytoma/malignant glioma, ependymoma, medulloblastoma, supratentorial primitive neuroectodermal tumor, visual pathway or hypothalamic glioma, breast cancer, bronchial adenoma/carcinoid, Burkitt lymphoma, carcinoid tumor, carcinoma, central nervous system lymphoma, cervical cancer, chronic lymphocytic leukemia, chronic myelogenous leukemia, chronic myeloproliferative disorder, colon cancer, cutaneous T-cell lymphoma, desmoplastic small round cell tumor, endometrial cancer, ependymoma. epidermoid carcinoma, esophageal cancer, Ewing's sarcoma, extracranial germ cell tumor, extragonadal germ cell tumor, extrahepatic bile duct cancer, eye cancer/intraocular melanoma, eye cancer/retinoblastoma, gallbladder cancer, gallstone tumor, gastric/stomach cancer, gastrointestinal carcinoid tumor, gastrointestinal stromal tumor, giant cell tumor, glioblastoma multiforme, glioma, hairy-cell tumor, head and neck cancer, heart cancer, hepatocellular/liver cancer, Hodgkin lymphoma, hyperplasia, hyperplastic corneal nerve tumor, in situ carcinoma, hypopharyngeal cancer, intestinal ganglioneuroma, islet cell tumor, Kaposi's sarcoma, kidney/renal cell cancer, laryngeal cancer, leiomyoma tumor, lip and oral cavity cancer, liposarcoma, liver cancer, non-small cell lung cancer, small cell lung cancer, lymphomas, macroglobulinemia, malignant carcinoid, malignant fibrous histiocytoma of bone, malignant hypercalcemia, malignant melanomas, marfanoid habitus tumor, medullary carcinoma, melanoma, merkel cell carcinoma, mesothelioma, metastatic skin carcinoma, metastatic squamous neck cancer, mouth cancer, mucosal neuromas, multiple myeloma, mycosis fungoides, myelodysplastic syndrome, myeloma, myeloproliferative disorder, nasal cavity and paranasal sinus cancer, nasopharyngeal carcinoma, neck cancer, neural tissue cancer, neuroblastoma, oral cancer, oropharyngeal cancer, osteosarcoma, ovarian cancer, ovarian epithelial tumor, ovarian germ cell tumor, pancreatic cancer, parathyroid cancer, penile cancer, pharyngeal cancer, pheochromocytoma, pineal astrocytoma, pineal germinoma, pineoblastoma, pituitary adenoma, pleuropulmonary blastoma, polycythemia vera, primary brain tumor, prostate cancer, rectal cancer, renal cell tumor, reticulum cell sarcoma, retinoblastoma, rhabdomyosarcoma, salivary gland cancer, seminoma, Sezary syndrome, skin cancer, small intestine cancer, soft tissue sarcoma, squamous cell carcinoma, squamous neck carcinoma, stomach cancer, supratentorial primitive neuroectodermal tumor, testicular cancer, throat cancer, thymoma, thyroid cancer, topical skin lesion, trophoblastic tumor, urethral cancer, uterine/endometrial cancer, uterine sarcoma, vaginal cancer, vulvar cancer, Waldenstrom's macroglobulinemia and Wilm's tumor.

[0568] The methods provided herein can be used in combination with one or more additional methods for detecting or monitoring a cancer or tumor or monitoring an anti-cancer therapy. For example, a tumor or metastasis can be detected by physical examination of subject, laboratory tests, such as blood or urine tests, imaging and genetic testing, such as testing for gene mutations that are known to cause cancer. A tumor or metastasis can be detected using in vivo imaging techniques, such as digital X-ray radiography, mammography, CT (computerized tomography) scanning, MRI (magnetic resonance imaging), ultrasonography and PET (positron emission tomography) scanning. Alternatively, a tumor can be detected using tumor markers in blood, serum or urine, that is, by monitoring substances produced by tumor cells or by other cells in the body in response to cancer. For example, prostate specific antigen (PSA) levels are used to detect prostate cancer in men. Additionally, tumors can be detected and monitored by biopsy.

[0569] Any of a variety of monitoring steps can be used to monitor an anti-cancer therapy, including, but not limited to, monitoring tumor size, monitoring anti-(tumor antigen) antibody titer, monitoring anti-virus antibody titer, monitoring the presence and/or size of metastases, monitoring the subject's lymph nodes, monitoring the subject's weight or other health indicators including blood or urine markers, monitoring expression of a detectable gene product, and monitoring titer of the oncolytic reporter virus, in a tumor, tissue or organ of a subject.

[0570] 8. Additional Analysis of Identified CTCs and Validation of Results

[0571] Additional analysis can be performed on the CTCs that have been detected using the methods provided herein. For example, assays to confirm tumor cell identity, analyze gene expression, or identify subpopulations of CTCs with differences in gene expression or other physical and/or biological properties can be performed. Exemplary methods include, but are not limited to, morphological analysis, immunohistochemistry with one or more tumor cell markers, or gene expression analysis (e.g., genetic profiling). Such methods are known in the art and can be performed during or following detection of the CTCs using the methods provided. Further analysis of detected CTCs also can include determining the origin of the tumor, such as for example, by immunostaining or gene expression analysis.

[0572] Any appropriate method known in the art can be employed to detect expressed gene products, including, but not limited to, quantitative PCR, quantitative RT-PCR, Northern analysis, ELISA, Western blotting and other immunodetection techniques. In particular example, antibodies conjugated to a detectable moiety can be employed for detection. For example, antibodies can be conjugated to fluorescent proteins or molecules, such as for example, but not limited to, Rhodamine, Fluorescein, Cy3, Alexa Fluor 405, Alexa Fluor 488, Alexa Fluor 546, Alexa Fluor 555, Alexa Fluor 633, Alexa Fluor 647, Allophycocyanin (APC), APC-Cy7, fluorescein isothiocyanate (FITC), Pacific Blue, R-phycoerythrin (R-PE), PE-Cy5, PE-Cy7, Texas Red, PE-Texas Red, peridinin chlorophyll protein (PerCP), PerCP-Cy5.5, or can be conjugated to enzymes, such as for example, but not limited to, horseradish peroxidase (HRP) or alkaline phosphatase (AP). Cytological stains that detect, for example, the nucleus (e.g. nucleic acid stains Hoechst 33342 (H33342) and 4′,6-diamidino-2-phenyl indole dihydrochloride (DAPI)) or other cell organelles also can be employed.

[0573] In some examples, the detected CTCs are further analyzed for cancer stem cell (CSC) properties. In some examples, immunohistochemistry or RT-PCR is performed to analyze the presence of CSC markers such as, but not limited to, CD24, CD34, CD44, CD133, and CD166. In particular examples, an AdnaTest is performed to analyze ALDH1 activity. Exemplary procedures for performing an AdnaTest are provided herein.

[0574] In some examples, immunohistochemistry or RT-PCR is performed to analyze the presence of epithelial cell markers, such as cytokeratins, for example cytokeratins 1-20, for example cytokeratins 1, 4-8, 10-11 and 13-20 or a combination thereof. In particular examples, cytokeratins 8, 18, 19 and/or 20 are detected. Examples of further epithelial markers or tumor cell markers include, but are not limited to, CD44, epidermal growth factor receptor (EGFR), human epidermal growth factor receptor 2 (HER2), prostate specific antigen (PSA, Israeli et al., (1994) Cancer Res 54, 6306-6310), prostate specific membrane antigen (PSMA), the human melanoma antigen (MAGE)-encoding gene family (De Plaen et al. (1994) Immunogenetics 40:360-369), Hasegawa et al. (1998) Pathol Lab Med 122, 551-554), breast-specific antigens such as MAS-385, SB-6 (Ross et al. (1993) Blood 82:2605-2610), Mucin-1 (MUC-1) (Brugger et al. (1999) J Clin Oncol 17:1535-1544) and GA733-2 (Zhong et al. (1999) Tumor Diagn. Ther. 20:39-44), adhesion molecules such as TFS-2, EpCAM (Racila et al. (1998) Proc Natl Acad Sci USA 95:4589-4594), E-Cadherin, or CEACAM1 (Thies et al. (2002) J Clin Oncol 20: 2530-2536), receptor molecules, such as leukocyte associated receptor (LAR), cMET/hepatocyte growth factor receptor (HGFR), androgen receptor, and estrogen-progesterone receptors (Bitran et al. (1992) Dis Mon 38: 213-260), carcinoembryonic antigen (CEA) (Liefers et al. (1998) N Engl J Med 339:223-228), PRL-3 protein, a tyrosine phosphatase (Saha et al. (2001) Science 294, 1343-1346) or maspin, a protein from the serpin family (Sabbatini et al. (2000) J Clin Oncol 18, 1914-1920); CA15.3 CA125, mesothelin, S100, and glial fibrillary acidic protein (GFAP), CD34, ErbB-2/I-IER2, ERcc1, CXCR4, ribonucleotide reductase subunit M1 (RRM1), insulin-like growth factor-I (IGF1), echinoderm microtubule-associated protein-like 4 (EML-4), RecQ-mediated genome instability protein 1 (RMI1), and DNA excision repair protein ERCC-1. In some examples, the presence of a specific genetic modification are analyzed, such as for example, a gene mutation, insertion or deletion.

### D. THERAPEUTIC METHODS

[0575] The diagnostic methods provided herein for detection and enumeration of CTCs can be used in combination with other diagnostic methods and with therapeutic methods for the treatment of cancer and metastases. As shown herein in the examples provided, administration of oncolytic reporter viruses results in inhibition of metastasis and metastatic tumor formation and regression of primary and metastatic tumors. The oncolytic viruses also treat CTCs that have been shed from the tumor. Inhibition of metastasis results in decreased shedding of tumor cells. Treatment with an oncolytic virus thus results in decreased tumor cells found in body fluids of the subject which can be monitored using the methods of detection provided herein.

[0576] In some examples, subjects are selected for treatment with an anti-cancer agent based on the detection of one more CTCs in a sample from the subject. Upon detection of one or more tumor cells in a body fluid sample, the subject can be prescribed a particular regimen or course of therapy. In some examples, the subject is administered one or more anticancer agents. In some examples, the anticancer agent is an oncolytic virus. The reporter viruses used in the methods provided are oncolytic viruses and can be used for therapy. In some examples, a different oncolytic virus is administered for therapy. As described herein, oncolytic viruses can also be modified to express therapeutic proteins, such as anti-cancer proteins or additional diagnostic proteins.

[0577] Additional exemplary anticancer agents that can be administered for cancer therapy in the methods provided include, but are not limited to, chemotherapeutic compounds (e.g., toxins, alkylating agents, nitrosoureas, anticancer antibiotics, antimetabolites, antimitotics, topoisomerase inhibitors), cytokines, growth factors, hormones, photosensitizing agents, radionuclides, signaling modulators, anticancer antibodies, anticancer oligopeptides, anticancer oligonucleotides (e.g., antisense RNA and siRNA), angiogenesis inhibitors, radiation therapy, or a combination thereof. Exemplary chemotherapeutic compounds include, but are not limited to, Ara-C, cisplatin, carboplatin, paclitaxel, doxorubicin, gemcitabine, camptothecin, irinotecan, cyclophosphamide, 6-mercaptopurine, vincristine, 5-fluorouracil, and methotrexate. As used herein, reference to an anticancer or chemotherapeutic agent includes combinations or a plurality of anticancer or chemotherapeutic agents unless otherwise indicated. Anticancer agents include anti-metastatic agents. In some examples, the anti-cancer agent is an oncolytic virus, such as an LIVP vaccinia virus.

[0578] In some examples, a oncolytic reporter virus is administered to a subject for the detection of CTCs in a sample from the subject or in vivo using the methods provided herein. In some examples, where the subject has cancer, tumor, metastasis, or one or more CTCs, the administered oncolytic reporter virus can simultaneously provide therapy of the cancer, tumor, metastasis, or one or more CTCs. For example, the oncolytic reporter virus can provide oncolytic therapy of the cancer, tumor, metastasis, or CTCs. The oncolytic virus also can express one or more therapeutic genes for therapy of the cancer, tumor, metastasis, or CTCs. Exemplary therapeutic genes for expression are provided elsewhere herein and include, but are not limited to, tumor suppressors, cytostatic proteins and costimulatory molecules, such as a cytokine, a chemokine, or other immunomodulatory molecules, an anticancer antibody, such as a single-chain antibody, antisense RNA, siRNA, prodrug converting enzyme, a toxin, a mitosis inhibitor protein, an antitumor oligopeptide, an anticancer polypeptide antibiotic, an angiogenesis inhibitor, or tissue factor.

[0579] Metastatic tumor cells such as circulating tumor cells (CTCs), and tumor cells in the cerebrospinal fluid (CSF) and the ascites, are surrogate markers in evaluating cancer prognosis and for monitoring therapeutic response. In addition, these metastatic tumor cells are targets for treatment. As exemplified herein, live metastatic tumor cells were detected by the method herein and shown by the methods provided herein to be eliminated by oncolytic vaccinia virus (VACV) treatment. Live CTCs in the blood drawn from mice bearing human prostate and lung cancer xenografts as well as in the blood drawn from patients with metastatic breast, colorectal, lung cancers, and melanoma were detected and enumerated using a tumor cell-specific recombinant reporter VACV that over-expresses the bright far-red fluorescent protein TurboFP635, in an epithelial biomarker-independent manner. Similarly, live tumor cells in the CSF obtained from a patient with late-stage metastatic breast cancer were specifically detected by the methods herein. The methods herein also demonstrate that early treatment with a single intravenous injection of the oncolytic VACV prevented CTC formation, and late treatment resulted in elimination of CTCs in mice bearing human prostate cancer xenografts. A single intra-peritoneal delivery of VACV resulted in a dramatic decline in the number of tumor cells in the ascitic fluid from a patient with peritoneal carcinomatosis from gastric cancer 7 days after treatment. Thus, the methods herein provide a reliable tool for quantitative detection of live tumor cells in liquid biopsies and also are concomitantly effective as a treatment for reducing or eliminating live tumor cells in body fluids of cancer patients with metastatic disease.

### E. COMBINATIONS, KITS, AND ARTICLES OF MANUFACTURE

[0580] The oncolytic reporter viruses and reagents, materials and devices for detecting a reporter gene, performing a tumor cell enrichment method, or further analyzing detected CTCs and combinations thereof, can be provided as combinations of the agents, which optionally can be packaged as kits. In non-limiting examples, an oncolytic reporter virus can be provided in combination with a microfilter or a microfluidic device. In non-limiting examples, an oncolytic reporter virus can be provided in combination with a substrate or ligand that binds to the expressed reporter protein. In other non-limiting examples, an oncolytic reporter virus can be provided in combination with reagents for the lysis of red blood cells in a blood sample or antibodies for the removal of non-CTCs from the sample. In other non-limiting examples, an oncolytic reporter virus can be provided in combination with reagents for additional analysis of detected CTCs, such as for example, reagent to measure one or more additional tumor cell markers. For example, kit can include reagents to fix, permeabilize, stain, or lyse tumor cells, reagents for amplification of nucleic acid, antibodies for immunohistochemical analysis and/or primers for RT-PCR or qPCR.

[0581] Kits can optionally include one or more components such as instructions for use, additional reagents such as diluents, culture media, substrates, antibodies and ligands, and material components, such as sample collection devices, microfilters, microfluidic chips, microscope slides, tubes, microtiter plates (e.g., multi-well plate) and containers for practice of the methods. Those of skill in the art will recognize many other possible containers and plates that can be used for contacting the various materials.

[0582] Exemplary kits can include the viruses provided herein, and can optionally include instructions for use, and additional reagents used in detection of virus infection, such as expression of a reporter gene by the reporter virus. Such reagents can include one or more substrates for detection of a reporter enzyme. Examples of such reagents are described herein. In some examples, the kit includes a device, such as a fluorometer, luminometer, or spectrophotometer for assay detection.

[0583] In some examples, the viruses can be supplied in a lyophilized form, and the kit can optionally include one or more solutions for reconstitution of the virus. In a further example, the lyophilized viruses can be supplied in the kit in appropriate amounts in the wells of one or more microtiter plates or sample tubes.

[0584] In some examples, a kit can contain instructions. Instructions typically include a tangible expression describing the virus and, optionally, other components included in the kit, and methods for assay, including methods for preparing the virus, methods for preparing the samples, methods for detection of the reporter protein expressed by the viruses, and methods for performing the tumor cell enrichment method.

[0585] The articles of manufacture provided herein contain the reporter viruses and packaging materials. Packaging materials for use in packaging products are known to those of skill in the art. See, e.g., U.S. Pat. Nos. 5,323,907, 5,052,558 and 5,033,252. Examples of packaging materials include, but are not limited to, blister packs, bottles, tubes, bags, vials, containers, and any packaging material suitable for a selected formulation and intended use. Articles of manufacture include a label with instructions for use of the packaged material.

[0586] One of skill in the art will appreciate the various components that can be included in a kit, consistent with the methods and systems disclosed herein.

### F. EXAMPLES

[0587] The following examples are included for illustrative purposes only and are not intended to limit the scope of the invention. It is to be understood that the methods and compositions provided herein are exemplified with the LIVP virus GLV-1h68 but that any oncolytic virus, particularly any vaccinia virus, but also any virus that accumulates in and replicates in tumor cells, can be employed in the methods and compositions herein. The methods detect CTC cells, include cancer stem cells, in body fluids by virtue of accumulation and replication of a detectable oncolytic virus (oncolytic reporter virus) in such cells.

### Example 1

### Analysis of the Metastatic Spread of the Human Prostate Carcinoma Cell Line PC-3

[0588] In this example, the metastatic spread of the human prostate carcinoma cell line, PC-3, is shown. A mouse xenograft model of human prostate cancer was developed in which PC-3 cells were injected subcutaneously into the right rear flank of immunocompromised mice. The mice then were assessed for subsequent metastasis at multiple time points post-injection.

### A. Analysis of Lymph Node Size Following PC-3 Tumor Cell Implantation

[0589] Tumors were established by subcutaneous implantation of 2×10⁶ PC-3 human prostate cancer cells (ATCC# CRL-1435), suspended in phosphate buffered saline (PBS), or PBS only, into the right flank of homozygous nude mice (Hsd:Athymic Nude-FoxnInu; Harlan, Indianapolis, Ind.; n=4 per treatment group, 24 mice total). Mice were sacrificed at 7, 14, 21, 28, 35, and 42 days post-tumor cell implantation, and the lumbar and renal lymph nodes in the abdominal cavity were examined following ventral incision and removal of internal organs. The number and volume (mm³) of enlarged lymph nodes per mouse were assessed. Volume was measured by digital caliper. The average volume of lumbar and renal lymph node per mouse and the average volume for all lymph nodes was calculated. A lymph node with a diameter greater than 2 mm was considered to be enlarged. The number of enlarged lymph nodes per mouse increased from week to week from ˜2 enlarged lymph nodes per mouse at 7 days post implantation to ˜4 enlarged lymph nodes per mouse at 28 days post implantation to ˜5 enlarged lymph nodes per mouse at 42 days post implantation. The total volume of the enlarged lymph nodes also increased with time from approximately 1 mm³ at 7 days post implantation to greater than 20 mm³ at 28 days post implantation to greater than 30 mm³ at 42 days post implantation.

[0590] The lymph nodes were then classified as either renal or lumbar lymph nodes based on their location and assessed individually. The volumes of two renal lymph nodes (RN1 and RN2) and two lumbar lymph nodes (LN1 and LN2) were individually measured at 7, 14, 21, and 28 days post-inoculation to determine if the volume of the enlarged lymph node correlated with its location. At 21 days post implantation, LN1, located on the right-hand side of the mouse, closest to the tumor cell implantation site, demonstrated a significantly greater increase in volume than any of the other three lymph nodes (LN1 was greater than 20 (21 mm3) mm³ compared to the size of the other lymph nodes, which were 7 mm³ or less. At 28 days post tumor cell implantation LN1 was still larger (˜40 mm³) than LN2 (˜33 mm³), RN1 (˜21 mm³), and RN2 (˜12 mm³). Thus, the increase in volume depended on the localization of the lymph node in relation to the tumor. The lymph nodes closer to the primary tumor exhibited more rapid growth than the lymph nodes farther from the tumor.

### B. Presence of Exogenous PC-3 Tumor Cells in Enlarged Lymph Nodes

[0591] Lymph nodes obtained from mice bearing human PC-3 xenograft tumors (from part A above) were analyzed for the presence of PC-3 tumor cells. At 21, 28, 35, and 42 days post-implantation, the lymph nodes measured in part A above were homogenized, and messenger RNA was isolated and analyzed by reverse transcriptase polymerase chain reaction (RT-PCR) using primers for human β-actin to test for the presence of human-derived PC-3 cells, and primers for mouse β-actin as a positive control for murine tissue.

Human β-actin Forward Primer:
(SEQ ID NO: 22)
5′-CCTCTCCCAAGTCCACACAG-3′
Human β-actin Reverse Primer:
(SEQ ID NO: 23)
5′-CTGCCTCCACCCACTC-3′
Murine β-actin Forward Primer:
(SEQ ID NO: 24)
5′-CGTCCATGCCCTGAGTC-3′
Murine β-actin Reverse Primer:
(SEQ ID NO: 25)
5-GCTGCCTCAACACCTCAAC-3′

[0592] The presence of human β-actin at each time point is set forth in Table 4 below. At 42 days post-implantation, PC-3 cells, as determined by the presence of human β-actin, were detected in 90% of all enlarged lymph nodes, indicating that the PC-3 cells of the implanted tumor metastasized into the lymph nodes.

TABLE 4
Lymph Nodes Positive for β-Actin

| Days Post- | fraction human β-actin- | % human β-actin- |
|---|---|---|
| Implantation | positive lymph nodes | positive lymph nodes |
| 21 | 3/14 | 21% |
| 28 | 11/16 | 69% |
| 35 | 14/17 | 83% |
| 42 | 18/20 | 90% |

### Example 2

### Visualization of PC-3 Cell Metastasis

[0593] In this example, a PC-3 cell line that expresses red fluorescent protein was established to facilitate discrimination of PC-3 cells from murine cells and allow tracking of metastatic cells. The cell line was used to visualize the metastatic spread of PC-3 cells from xenograft tumors in mice.

### A. Generation of PC-3 Cells Constitutively Expressing Red Fluorescent Protein (RFP)

[0594] cDNA encoding monomeric red fluorescent protein (mRFP) (SEQ ID NO:19 (protein) SEQ ID NO:18 (cDNA)) was stably inserted into the PC-3 cell genome by lentiviral transduction using the ViraPower™ Lentiviral Expression System Kit (Invitrogen GmbH, Germany) in accordance with the manufacturer's instructions. The RFP gene for cloning into the lentiviral vector was obtained by PCR from the mRFP-encoding plasmid pCR-TK-Sel-mRFP (SEQ ID NO:16) using the following primers, which contain attB recombination sites for gateway cloning.

Forward-attB1-mRFP:
(SEQ ID NO: 26)
5′-GGGGACAAGTTTGTACAAAAAAGCAGGCTGCCACCATGGCCTCCTCC
GAGG-3′
Reverse-attB2-mRFP:
(SEQ ID NO: 27)
5′-GGGGACCACTTTGTACAAGAAAGCTGGGTCAGAATTCGCCCTTTCAT
TAGG-3′

[0595] The PCR product was cloned into a Gateway entry vector (Invitrogen). Site-specific recombination was then carried out between the Gateway vector and the pLENTI6/V5-DEST retroviral vector (Invitrogen Cat. No. V496-10) according to the manufacturer's instructions to produce the pLENTI6/V5-DEST-mRFP expression plasmid, which contains the mRFP gene under the control of the human CMV immediate early promoter for constitutive expression. Replication-incompetent mRFP-coding Lentiviruses were produced in 293FT cells via a co-transfection of the Vira Power™ Packaging Mix and the pLENTI6/V5-DEST-mRFP expression plasmid using Lipofectamine™2000. After transduction of PC-3 cells with mRFP-coding. Lentiviruses, stable RFP-expressing PC-3 clones were selected using 10 μg/mL blasticidin. Approximately 3 months were required for the selection of a stable cell line. Expression of RFP in the PC-3 cell line was observed in 100% of the cells as 90 days post-transduction as confirmed by observation using a fluorescent microscope equipped with the appropriate filter.

### B. Visualization of PC-3-RFP Cells in Mice

[0596] 2×10⁶ PC-3-RFP cells were injected into female nude mice (n=6) as described in Example 1A. Imaging in anesthetized whole living mice to detect the red fluorescent signal in the tumor was performed every week. Imaging was performed by the Maestro EX Imaging System (Cri, Woburn, USA). RFP fluorescence was readily visible in the right flank where the tumor had developed.

[0597] At 55 and 65 days post-injection, the mice were sacrificed, the internal organs were removed, and the remaining renal and lumbar lymph nodes were examined in situ by RFP fluorescence. Imaging of lymph node metastases in the abdominal cavity was performed with the MZ 16 FA Stereo-Fluorescence microscope (Leica, Wetzlar, Germany). At 55 days post-injection, the lumbar lymph nodes, particularly the lymph node proximal to the site of PC-3-RFP tumor cell injection exhibited strong RFP fluorescence. The renal lymph nodes also exhibited RFP fluorescence, but to a lesser extent. Detection of RFP in the enlarged lymph nodes was evidentiary of tumor metastasis. At 65 days post-injection, RFP fluorescence was further increased and was additionally detectable in vessel-like structures, connected to, and between the lumbar and renal lymph node metastases, indicating a pathway for migration of metastatic tumor cells from the lumber lymph node to the renal lymph node.

### Example 3

### Analysis of PC-3-RFP Cell Migration

[0598] In this example, the method of cell migration from the lumber lymph node to the renal lymph node was investigated. To determine if PC-3-RFP use blood vessels or lymphatic vessels for migration, histological studies were conducted. Tissues containing the RFP-positive vessel-like structure between the lumbar and renal lymph node metastases in Example 2B were surgically removed, fixed for 16 hours in 4% paraformaldehyde/PBS, pH 7.4. After fixation, samples were washed and embedded into 5% w/v low melt agarose (AppliChem, Darmstadt, Germany) in PBS. Preparation of 100 μm sections was performed using the Leica VT1000 Vibratome (Leica, Heerbrugg, Switzerland). Sections were permeabilized in PBS containing 0.3% Triton X-100 for 1 hour.

[0599] The sections were then immunostained overnight using a hamster monoclonal anti-CD31 antibody (Chemicon International, Temecula, USA; Cat. No. MAB1398Z) as a marker for endothelial cells of blood vessels, or a rabbit polyclonal anti-LYVE-1 (lymphatic vessel endothelial hyaluronan receptor) antibody (Abeam, Cambridge, UK; ab14917) as a marker for lymphatic endothelial cells. All primary and secondary antibodies were diluted in PBS/0.3% Triton-X-100 for the incubation steps. After washing the sections with PBS, the sections were incubated with secondary antibody, donkey DyLight488-conjugated secondary antibody (Jackson ImmunoResearch, Pennsylvania), for 4 hours. Following incubation, sections were washed again with PBS. After labeling, tissue sections were mounted in Mowiol 4-88 (Sigma-Aldrich, Taufkirchen, Germany). The sections were visualized by fluorescence microscopic analysis using the appropriate filters. The endothelial markers were visible in the green channel and PC-3-RFP cells were visible in the red channel. The red and green channel images were overlaid to determine the pathway of PC-3-RFP cell migration.

[0600] CD31-stained sections indicated the location of blood vessel endothelial cells relative to the PC-3-RFP cells. In one CD31-stained section, the endothelial ring, corresponding to the cross-section of the abdominal aorta was observed adjacent to a cross-section of RFP-positive tissue, but did not surround the RFP-positive tissue indicating that the PC-3-RFP cells do not migrate via blood vessels. In contrast, LYVE-1-stained sections, revealed a lymphatic endothelial ring surrounding the PC-3-RFP cells, demonstrating that PC-3-RFP cells use lymphatic vessels for migration.

### Example 4

### Metastases in Non-Lymphatic Tissue

[0601] To determine the extent of metastases of PC-3-RFP cells, other tissues were examined for RFP fluorescence. PC-3-RFP cells were injected into nude mice (n=6) as described in Example 2B. 76 days post cell injection, the lungs were harvested from the animals and placed into a PBS-filled well of a 12-well plate and examined for RFP fluorescence and under bright field microscopy using a MZ 16 FA Stereo-Fluorescence microscope (Leica, Wetzlar, Germany). At 76 days post-implantation, RFP fluorescence was detectable throughout the lung tissue, indicating the presence of hematogenous metastases.

### Example 5

### Colonization of PC-3 Tumors and Metastases by Vaccinia Virus GLV-1h68

[0602] In this example, preferential colonization of the Lister strain vaccinia virus GLV-1h68 (SEQ ID NO: 1; U.S. Pat. Pub. No.: US2005/0031643) in lymph node metastases was examined. The GLV-1h68 virus contains an expression cassette containing a Ruc-GFP cDNA (a fusion of DNA encoding Renilla luciferase and DNA encoding GFP) under the control of a vaccinia synthetic early/late promoter P_{SEL} in the F14.5L gene of the virus genome. Infected cells can be detected by GFP fluorescence microscopy.

[0603] PC-3-RFP xenograft tumors were developed in 6-7 week-old female nude mice by implanting 2×10⁶ PC-3-RFP cells subcutaneously on the right hind leg as described in Example 2B. At 50 days post PC-3-RFP tumor cell implantation, 3 groups of 6 mice per groups were injected with a single intravenous dose of 1×10⁷ pfu of GLV-1h68 in 100 μL phosphate-buffered saline (PBS) or 100 μL PBS only via the tail vein. Analysis of enlarged lymph nodes and tumors was performed at 3, 7, and 14 days post virus infection (dpi). Animals were sacrificed and prepared as described in Example 1, and the tumors, lymph nodes, and lymphatic vessels were visualized by fluorescence microscopy, using filters to visualize RFP and GFP fluorescence. Images were taken in the green (GLV-1h68) and red (PC-3-RFP) channels and were overlaid to permit co-localization analysis.

[0604] At 3 dpi, PC-3-RFP metastases were detected in the renal and lumbar lymph nodes and lymphatic vessels in addition to the solid primary tumor at the site of tumor cell inoculation, consistent with the observations in Example 2B. At the same time point, GLV-1h68 was also detected in the lymph nodes and lymphatic vessels and, to a lesser extent, in the tumor. GLV-1h68 colonization of the lymph node metastases and PC-3 cells in lymphatic vessels was further confirmed at 7 days post virus infection. At each time point, a higher intensity of GFP fluorescence was detected in lymph node metastases compared to the PC-3 tumor.

[0605] To confirm that viral colonization occurred preferentially in the metastases compared to the tumors, standard plaque assays were performed to determine viral titer in the tumor and lymph node tissue. Tumor and renal and lumbar lymph nodes were harvested, weighed, homogenized, and microcentrifuged to pellet debris at 3, 7, and 14 dpi (6 mice per time point) as previously described. The virus titer in each of the tissues was quantified by standard plaque assay on CV-1 cells. Virus titers were expressed as plaque forming units (pfu) and corresponded to the amount of infectious virus per gram tissue. The results are set forth in Table 5. At all three time points after virus injection, a higher GLV-1h68 titer was measured in the lymph node metastases compared to the PC-3 tumor. At 3 and 7 days post infection, a higher titer of GLV-1h68 was detected in renal lymph node metastases compared to lumbar metastases, indicating a correlation between a higher viral titer and metastases that arose at later time points.

TABLE 5
Viral Titer in Metastases and Tumors.

| | Viral Titer ± SEM | | |
|---|---|---|---|
| Tissue | 3 dpi | 7 dpi | 14 dpi |
| Tumor | 2.87 × 10⁶ | 3.23 × 10⁷ | 3.25 × 10⁷ |
| LN1^{a} | 4.13 × 10⁷ | 2.42 × 10⁸ | 4.75 × 10⁸ |
| LN2^{b} | 8.74 × 10⁷ | 4.91 × 10⁸ | 1.05 × 10⁹ |
| RN1^{c} | 2.37 × 10⁸ | 1.57 × 10⁹ | 7.92 × 10⁸ |
| RN2^{d} | 3.73 × 10⁷ | 1.27 × 10⁹ | 4.50 × 10⁸ |

^{a}LN1: lumbar lymph node proximal to the injection site
^{b}LN2: lumbar lymph node distal to the injection site
^{c}RN1: renal lymph node proximal to the injection site
^{d}RN2: renal lymph node distal to the injection site

### Example 6

### Analysis of GLV-1h68 Amplification in the Lymph System of Nude Mice

[0606] Because preferential viral amplification was observed in the lymph node metastases in Example 5, GLV-1h68 amplification in the lymph nodes of nude mice without tumors was analyzed and compared to metastasized lymph nodes to examine whether preferential accumulation was due to metastasis or the lymphatic tissue itself. To this end, GLV-1h68 accumulation was first measured in various lymph nodes, independent of metastases in non-tumor bearing mice. Next, the GLV-1h68 accumulation was compared in lymph nodes containing metastases with those that were unmetastasized. Finally, it was shown that lymphatic tissue inside the metastases was infected by GLV-1h68.

### A. GLV-1h68 Amplification in the Lymph System of Non-Metastasized Mice

[0607] The amplification of GLV-1h68 in non-tumor bearing nude mice was tested to determine if there was lymphatic tissue preference for GLV-1h68 amplification. 1×10′ pfu GLV-h168 were administered to 6-7 week-old female mice (n=3 per treatment group) via intravenous injection into the tail vein. At 7, 14, 21, and 42 dpi, the lumbar (LN), renal (RN), sciatic (SN), axillary (AN), and brachial (BN) lymph nodes proximal (1) and distal (2) to the injection site were harvested, homogenized and the viral titer was determined by standard plaque assay as described in Example 5.

[0608] Maximal virus titer of only 140 pfu was observed at 14 dpi in the axillary lymph node proximal to the injection site (AN 1). The lumbar and renal lymph nodes also produced similarly low viral titers of 22 and 2 pfu, respectively at 14 dpi. No statistically significant differences were detected between any of the lymph nodes at any of the time points considered.

### B. Comparison of GLV-1h68 Amplification in Non-Metastasized and Metastasized Lymph Nodes

[0609] To determine if amplification of GLV-1h68 occurs preferentially in metastases, the colonization of unmetastasized lymph nodes was compared with those containing metastases. 6-7 week old female mice (n=6 per treatment group) were injected with 2×10⁶ PC-3-RFP cells in the right hind leg as described in Example 2B. 1×10⁷ pfu GLV-1h68 in 100 μl PBS or PBS alone were administered via tail vein injection into PC-3-RFP implanted mice at 50 days post tumor cell implantation. The lymph and renal lymph nodes were harvested at 7 and 14 dpi and analyzed for virus titer by plaque assay as described in Example 5 and compared to the colonization data obtained in Part A.

[0610] At 7 and 14 dpi, there were about 10-20 million pfu GLV-1h68 detected in the metastasized lumbar and renal lymph nodes and 0-22 pfu detected in the unmetastasized lymph nodes. The differences in viral titer between metastasized and unmetastasized lymph nodes was statistically significant at 7 dpi (p<0.01) and 14 dpi (p<0.001). The metastasized renal lymph nodes also exhibited significantly higher levels (˜40 million pfu) of GLV-1h68 than control lymph nodes at 14 dpi (p<0.05). Overall, there was significantly higher infection of lymph node metastases than unmetastasized lymph nodes.

### C. Lymphatic Tissue and PC-3-RFP Metastases

[0611] To determine whether lymphatic tissue inside the PC-3 metastases contributed to the preferential amplification of GLV-1h68 in these tissues, the location of lymphatic cells was determined relative to the metastases. Nude mice were injected with 2×10⁶PC-3-RFP cells as described in Example 2B. At 21 and 88 days post tumor cell implantation, corresponding to early and late stages, respectively, of PC-3 metastatic cell invasion, the lumbar lymph nodes were excised, cross-sectioned, and fixed for immunofluorescence as described in Example 3. Lymphatic tissue was visualized by immunostaining using an antibody directed against the lymphatic endothelial cell marker (LYVE-1), rabbit polyclonal anti-LYVE-1 antibody (Abcam, Cambridge, UK; ab14917) and a donkey DyLight488-conjugated secondary antibody (Jackson ImmunoResearch, Pennsylvania).

[0612] For detection of antigen presenting cells (APCs) within the lumen of the lymph nodes, expression of major histocompatibility complex II (MHC-II) was examined. For

[0613] MHC-II staining, sections representing early and late metastasis were prepared from excised lymph nodes at 57 days post tumor cell implantation. Early and late metastasis samples were selected based on the relative size of the tumors (e.g., a small PC-3-RFP tumor was selected to represent early metastasis). The sections were prepared as described in Example 3 and stained for MHC-II using a monoclonal rat anti-MHC Class II (I-A/I-E) antibody (eBioscience, San Diego, Calif.; Cat. No. 14-5321) and a donkey DyLight488-conjugated secondary antibody (Jackson ImmunoResearch, Pennsylvania).

[0614] Sections were mounted and analyzed by fluorescence microscopy as described in Example 3. Images from the red channel, illustrating the locations of RFP-positive PC-3 cells, and the green channel, depicting the locations of lymphatic endothelial cells or APCs, were overlaid to determine the relative locations of the different cell types.

[0615] At early and late stages of PC-3 cell invasion, no co-localization or intermingling staining was observed between PC-3 cells and native lymph node constituent cells. As PC-3 cells invaded the lymph node tissue, the developing tumor displaced the lymphatic tissue and MHC-II positive cells. Thus, lymphatic tissue was not detected within the metastases. The lymphatic tissue itself is likely not a cause of preferential GLV-1h68 amplification within the lymph node metastases; however contributing factors to virus amplification produced by adjacent lymphatic tissue was not conclusively ruled out. Staining for LYVE-1 and MHC-II in early and late metastatic lymph nodes was repeated in two subsequent experiments, and similar results were obtained.

### Example 7

### Necrotic Tissue in PC-3 Tumors and Metastases

[0616] In this example, necrotic tissue in PC-3 tumors and metastases was measured to show that the presence of necrotic tissue contributed to preferential amplification of GLV-1h68 in lymph node metastases. Because viral replication is not possible in necrotic tissue, the tissue was examined to show whether a high amount of necrotic tissue was present in the tumors compared to metastases. 6-7 week-old nude mice were injected with 2×10⁶ PC-3 cells as described in Example 1. PC-3-derived tumors were permitted to grow and metastasize for 57 days, and then the tumors at the sites of injection and the lumbar and renal lymph nodes were removed, fixed and sectioned into 100 μm sections using a Vibratome, as described in Example 3. The sections were then stained with Hoechst dye to stain the DNA and enable visualization of the nuclei. Loss of nuclei is evidentiary of necrotic tissue. The fluorescence signals in whole section images (10× magnification) were analyzed. Two sections were measured per sample. The area of a section that was not stained by Hoechst, due to nuclei degradation, was defined as necrotic and quantified using Image) analysis software.

[0617] The percent necrotic area was determined for the tumor and lymph nodes. The necrotic area in PC-3 tumors was about 25%, whereas the necrotic areas in the lumbar and renal lymph nodes was about 10% and 15%, respectively. The difference in necrotic area was statistically significant between the tumor and the lumbar lymph node (p<0.005) and between the tumor and the renal lymph node (p<0.01), as determined by two-tailed Student's t test was used for statistical analysis. P values of ≦0.05 were considered statistically significant. Thus, there was less necrotic tissue in lymph node metastases than in PC-3 tumor, indicating that the lower GLV-1h68 accumulation in the primary tumor results, at least in part from the necrosis of the tumor.

### Example 8

### Analysis of Blood Vessels in PC-3 Tumors and Metastases

[0618] The blood vessels in PC-3 tumors and metastases were analyzed show that preferential amplification of GLV-1h68 in lymph node metastases was related to increased blood vessel density and/or increased permeability. The platelet endothelial cell adhesion molecule (PECAM-1/CD31), which is present on endothelial cells, platelets, macrophages and Kupffer cells, granulocytes, T/NK cells, lymphocytes, megakaryocytes, osteoclasts, neutrophils, was used as a marker of lymph node blood vessels. It is expressed in numerous physiological and pathological processes characterized by an increase of vascular permeability.

[0619] 100 μm Vibratome sections of tumors and lumbar and renal lymph nodes from 5 mice 57 days post PC-3 tumor cell implantation (from Example 7) were prepared as described in Example 3 and immunostained using antibodies directed against CD31 (Hamster monoclonal anti-CD31 antibody, Chemicon International, Temecula, USA; MAB1398Z). Blood vessel density and CD31 fluorescence intensity were determined.

[0620] Blood vessel density was measured at 100× magnification. Eight images per tumor, LN and RN, were analyzed per anti-CD31 staining. Images were taken with individual exposure times to capture all detectable blood vessels and cross-sected with 8 horizontal lines at identical positions using Photoshop 7.0. All blood vessels that crossed these lines were counted to yield the vessel density.

[0621] Measurement of the CD31 intensity was performed on digital images of the 100 μm stained sections of PC-3 tumors and metastases. For each staining, 8 images per sample were captured with identical settings. RGB-images were converted into 8-bit gray scale with an intensity range from 0-255. The fluorescence intensity of CD31 staining represents the average brightness of all staining related pixels and was measured using Image) software. Images of CD31 staining were taken at 100× magnification.

[0622] The mice exhibited indistinguishable blood vessel density in tumor and lumbar lymph node sections, and slightly increased blood vessel density (number of blood vessels per unit area) in the renal lymph nodes, compared to the lumbar lymph nodes. In contrast, there was a statistically significant increase in CD31 mean fluorescence intensity between the tumor and lumbar lymph node metastasis populations (p<0.05) and between the tumor and renal lymph node metastasis populations (p<0.005).

[0623] To confirm that the increased fluorescence intensity in the lymph node metastases compared to the tumor was due to an increase in CD31 protein levels, homogenates of tumors and lumbar and renal lymph node metastases were analyzed by quantitative Western blot, using fluorescent secondary antibodies, and a NightOWL Imaging System (Berthold) to measure relative light emission. Significantly increased CD31 protein expression was detected in lumbar (p<0.05) and renal (p<0.05) lymph node metastases than in the tumor. These results indicated that there was increased blood vessel permeability in the lymph node metastases, which would facilitate GLV-1h68 access to these tissues. Thus, increased vascular permeability results in preferential amplification of GLV-1h68 in lymph node metastases.

### Example 9

### Effects of GLV-1h68 Therapy on Metastasis Growth

[0624] In this example, the effect of GLV-1h68 on the size of lymph node metastases was analyzed. 2×10⁶ PC-3 cells were injected into 6-7-wk-old female and male nude mice using methods described in Example 1 (11 mice in PBS treated group and 11 mice in the GLV-1h68 treated group were used; male: n=5, female: n=6). At 30 days after cell implantation, 5×10⁶ pfu GLV-1h68 in 100 μL PBS or 100 μL PBS alone were administered by tail vein injection. The animals were sacrificed at 21 days post viral infection (dpi) and the number and volume of enlarged lymph nodes was determined, as described in Example 1A. A reduction in the number and volume of enlarged lymph nodes was observed in GLV-1h68-injected animals. In the female mice the number of enlarged lymph nodes decreased from about 5 to 2 enlarged lymph nodes per mouse and the average volume of the enlarged lymph nodes decreased from about 61 mm³ to 20 mm³. In the male mice the number of enlarged lymph nodes decreased from about 4.5 to 3 and the average volume of the enlarged lymph nodes decreased from about 48 mm³ to 12 mm³.

[0625] All enlarged lymph nodes were harvested and analyzed for the presence of exogenous PC-3 tumor cells by the detection of mRNA corresponding to the human β-Actin gene by RT-PCR (see Example 1B for experimental details; 11 mice per group were analyzed). There was a significant (p<0.005) reduction of lymph node metastases that were positive for human β-Actin 21 days post GLV-1h68 injection, compared to PBS-injected controls. Specifically, PC-3 cells were detected in 91% (45/49) of PBS-injected mice and 21% (6/28) of mice administered GLV-1h68.

[0626] The lungs of 12 PC-3 tumor-bearing mice (6 from the PBS control group and 6 from GLV-1h68 treatment group) were analyzed for the presence of PC-3 cells. Lung tissue was extracted from the mice 21 days following GLV-1h68 or PBS injection and analyzed for human β-Actin, as a marker for PC-3 cells, by RT-PCR as described above for the enlarged lymph nodes. RNA isolation was performed using a standard TRIzol RNA isolation protocol. Human β-Actin was detected in 83% (5/6) mice administered PBS alone, compared to 0% (0/6) of GLV-1h68-injected mice. GLV-1h68 treatment thus resulted in the reduction of hematogenous metastases in lungs in addition to the reduction in lymph node metastases described above.

### Example 10

### Effects of GLV-1h68 Therapy on Blood and Lymphatic Vessel Density

[0627] The influence of GLV-1h68 administration on blood and lymph vessel density was examined in PC-3 tumors and metastases. 2×10⁶ PC-3 cells were injected into 6-7 week-old female nude mice using methods described in Example 1 (n=10). At 50 days after cell implantation, 1×10⁷ pfu GLV-1h68 in 100 μL PBS or 100 μL PBS alone were administered by tail vein injection. At 7 dpi, or 57 days post PC-3-implantation, tumors and lumbar and renal lymph nodes were excised from the GLV-1h68 infected (n=5) and PBS control mice (n=5). 100 μm Vibratome sections of the tumors and lumbar and renal lymph nodes were prepared as described in Example 3. The sections of tumors and metastases were stained for CD31 expression, for analysis of blood vessels, with a hamster monoclonal anti-CD31 antibody (Chemicon International, Temecula, Calif.; Cat. No. MAB1398Z) or LYVE-1 expression, for analysis of lymphatic vessels, with a rabbit polyclonal anti-LYVE-1 antibody (Abcam, Cambridge, UK; Cat. No. ab14917) as described in Example 8. Vessel density was calculated as described in Example 8 for four images at 100× magnification from each of 2 sections.

[0628] Control mice, administered PBS, exhibited indistinguishable blood vessel density in tumor and lumbar lymph node sections, and slightly increased blood vessel density in the renal lymph nodes, compared to the lumbar lymph nodes (p<0.05) GLV-1h68-administered mice contained similar levels of blood vessel density between the tumor, lumbar lymph node, and renal lymph node tissues. Mice to whom GLV-1h68 was administered exhibited about a 50% reduction in blood vessel density, compared to PBS controls, in each of the three tissues (p<0.001). An identical pattern was observed for LYVE-1 stained sections, except that the lymphatic vessel density was reduced by ⅔ in each of the three tissue types examined (p<0.001).

[0629] In summary, by 7 dpi, GLV-1h68 administration significantly reduced the density of blood and lymphatic vessels in tumors and lymph node metastases. As described in Example 9, GLV-1h68 administration also resulted in a significant reduction of the number of lymphatic and hematogenous metastases and the size of metastatic tumors. The reduction of blood and lymph vessel density observed in this study can contribute to the GLV-1h68 metastasis inhibition indirectly by reducing delivery of nutrient and oxygen supplies and/or directly by eliminating pathways for hematogenous and lymphatic metastasis.

### Example 11

### Capture of Circulating Tumor Cells (CTCs) Using A Microfiltration Biochip

[0630] In this example, circulating tumor cells (CTCs) were isolated from mouse blood using a microfiltration biochip that captures CTCs based on size and cell deformability.

A. Efficiency of Capturing CTCs from Spiked Mouse Blood 100 μL of blood were drawn from a nu/nu mouse and spiked with 10 μL of DMEM-10 (DME containing 10% fetal bovine serum (FBS)) containing 100-300 PC-3-RFP cells (see Example 2). 80 μL of the spiked blood sample were run through a mounted biochip, CTChip® chip (Clearbridge Biomedics Pte Ltd., Singapore; see, Tan S. J. et al. (2009) Biomedical Microdevices 11(4): 883-892 and Tan et al. (2010) Biosens and Bioelect 26:1701-1705; see, also International PCT application No. WO 2011/109762), at −2000 Pa for 1.5 hours, as a part of a CTC0 Capture System Prototype (Clearbridge Biomedics Pte Ltd., Singapore). The CTChip® chip contains a pre-filter containing filter gaps of about 20 μm in size that receives fluid from a sample inlet. For capture of CTCs, the chip contains three sections of arrays of cell traps. The cell traps are crescent shaped structures with two filter gaps of 5 μm. The cell traps are arranged in staggered rows with alternating left and right tilted orientations. Each cell trap in each row is spaced 50 μm apart, and is offset 25 μm horizontally from a cell trap in the successive row. The chip also contains a waste outlet for untrapped cells and a retrieval outlet to retrieve trapped cells by reversing the pressure differential between the inlet and waste outlets.

[0631] RFP and bright field images of cells detained on the biochip were captured and streamed using a camera module coupled to NI USB-6211 data acquisition unit (National Instruments, Austin, Tex.). The captured RFP-positive cells were counted and divided by the number of cells injected to determine the isolation efficiency. The average PC-3-RFP capture efficiency for this system was 82.1%±7.4%, N=3.

B. Capturing CTCs from Mice Bearing PC-3-RFP Tumors

[0632] Mice were subcutaneously injected with 5×10⁶ PC-3-RFP cells in the right hind leg. At 44 days after tumor cell implantation, blood was drawn from the mouse via cardiac puncture, and 100 μL of the extracted blood were run through the biochip −2000 Pa for 1.5 hours as described in part A above. Visualization of cells captured by the biochip confirmed that the biochip was capable of isolating CTCs from the blood of mice bearing PC-3-RFP tumors.

[0633] At 65 days post tumor cell implantation, blood was drawn via cardiac puncture from the dying mouse, and 70 μL of the blood were run through the CTC0 Capture System Prototype at −2000 Pa for 1.5 hours as described above. Cells were imaged on the chip using an Olympus 1×71 inverted fluorescence microscope (Olympus, Tokyo, Japan), using bright field illumination and red fluorescence detection. Images were captured with an attached MicroFire® True Color Firewire microscope digital charge-coupled device camera (Optronics, Goleta, Calif., USA). A substantial increase in the number of captured CTCs was detected on the biochip, demonstrating that the number of CTCs captured on the biochip is indicative of the severity of the metastasis.

C. Capturing CTCs from Cancer Patient Samples and Spiked Samples in Combination With CTC Marker Immunostaining

[0634] 1. Capture and Immunostaining of Prostate Cancer CTCs

[0635] Peripheral blood samples were obtained from a cancer patient with prostate cancer. 1 mL of the peripheral blood sample was run through the CTC0 Capture System Prototype at −2000 Pa for 15 hours as described above. The microchip captured cells were then immunostained directly on the chip for cytokeratin to confirm the epithelial identity of the cells and the leukocyte marker CD45 as a negative control.

[0636] For immunostaining directly on the chip, the flow pressure was adjusted to −200 Pa. The cells were fixed with 4% paraformaldehyde (PFA) for 30 minutes, washed with 1×DPBS for 30 minutes, permeabilized in 20% methanol for 30 minutes, and then washed with 1×DPBS for 30 minutes. The fixed cells were then blocked with 10% goat serum for 30 minutes and stained with PE conjugated anti-CD45 antibody (eBioscience, Cat. 12-0459) and FITC conjugated anti-cytokeratin antibody cocktail (anti-CK8-FITC (eBioscience, Cat. 11-9938), anti-CK18-FITC (Sigma, Cat. F4772), and anti-CK19-FITC (eBioscience, Cat. 11-9898)) for 1 hour. The cells were washed with 1×DPBS for 30 minutes and then stained with 5 μg/mL Hoechst 33342 dye for 30 minutes.

[0637] Cells were imaged on the chip using an Olympus 1×71 inverted fluorescence microscope (Olympus, Tokyo, Japan), using bright field illumination and green and red fluorescence detection. Images were captured with an attached MicroFire® True Color Firewire microscope digital charge-coupled device camera (Optronics, Goleta, Calif., USA). The cells captured by the chip were positive for cytokeratin staining, but not CD45 staining, indicating that the captured cells are CTCs and not blood cells. CTC identity also was confirmed by morphological analysis of the phase contrast images of the captured cells and Hoechst staining of the cell nuclei.

[0638] 2. Capture and Immunostaining of Lung Cancer CTCs

[0639] Peripheral blood samples were obtained from a cancer patient with lung cancer. 1 mL of the peripheral blood sample was run through the CTC0 Capture System Prototype at −2000 Pa for 15 hours as described above. The microchip captured cells were then immunostained for cytokeratin to confirm the epithelial identity of the cells and the leukocyte marker CD45 as a negative control.

[0640] For immunostaining directly on the chip, the flow pressure was adjusted to −200 Pa. The cells were fixed with 4% paraformaldehyde (PFA) for 30 minutes, washed with 1×DPBS for 30 minutes, permeabilized in 20% methanol for 30 minutes, and then washed with lx DPBS for 30 minutes. The fixed cells were then blocked with 10% goat serum for 30 minutes and stained with PE conjugated anti-CD45 antibody (eBioscience, Cat. 12-0459) and FITC conjugated anti-cytokeratin antibody cocktail (anti-CK8-FITC (eBioscience, Cat. 11-9938), anti-CK18-FITC (Sigma, Cat. F4772), and anti-CK19-FITC (eBioscience, Cat. 11-9898)) for 1 hour. The cells were washed with 1×DPBS for 30 minutes and then stained with 5 μg/mL Hoechst 33342 dye for 30 minutes.

[0641] Cells were imaged on the chip using an Olympus 1×71 inverted fluorescence microscope (Olympus, Tokyo, Japan), using bright field illumination and green and red fluorescence detection. Images were captured with an attached MicroFire® True Color Firewire microscope digital charge-coupled device camera (Optronics, Goleta, Calif., USA). The cells captured by the chip were positive for cytokeratin staining, but not CD45 staining, indicating that the captured cells are CTCs and not blood cells. CTC identity also was confirmed by morphological analysis of the phase contrast images of the captured cells and Hoechst staining of the cell nuclei.

[0642] 3. Capture and Immunostaining of Breast Cancer CTCs

[0643] Peripheral blood samples were obtained from a cancer patient with lung cancer. 0.5 mL of the peripheral blood sample was run through the CTC0 Capture System Prototype at −2000 Pa for 15 hours as described above. The microchip captured cells were then immunostained for cytokeratin to confirm the epithelial identity of the cells. For immunostaining directly on the chip, the flow pressure was adjusted to −200 Pa. The cells were fixed with 4% paraformaldehyde (PFA) for 30 minutes, washed with 1×DPBS for 30 minutes, permeabilized in 20% methanol for 30 minutes, and then washed with 1×DPBS for 30 minutes. The fixed cells were then blocked with 10% goat serum for 30 minutes and stained with PE-conjugated anti-CD45 antibody (eBioscience, Cat. 12-0459) and FITC-conjugated anti-cytokeratin antibody cocktail (anti-CK8-FITC (eBioscience, Cat. 11-9938), anti-CK18-FITC (Sigma, Cat. F4772), and anti-CK19-FITC (eBioscience, Cat. 11-9898)) for 1 hour. The cells were washed with 1×DPBS for 30 minutes and then stained with 5 μg/mL Hoechst 33342 dye for 30 minutes.

[0644] Cells were imaged on the chip using an Olympus 1×71 inverted fluorescence microscope (Olympus, Tokyo, Japan), using bright field illumination and green and red fluorescence detection. Images were captured with an attached MicroFire® True Color Firewire microscope digital charge-coupled device camera (Optronics, Goleta, Calif., USA). The cells captured by the chip were positive for cytokeratin staining, indicating that the captured cells are CTCs and not blood cells. CTC identity also was confirmed by morphological analysis of the phase contrast images of the captured cells and Hoechst staining of the cell nuclei.

[0645] 4. Capture and Immunostaining of CTCs from GBM Samples Spiked with PC-3 Tumor Cells

[0646] In order to determine whether CTCs could be detected in a blood sample from a cancer patient with glioblastoma multiform (GBM), blood samples from a GBM patient were spiked with PC-3-RFP cells and examined. 0.5 mL of a peripheral blood sample from a cancer patient with GBM was spiked with 10 μL of DMEM-10 (DME containing 10% fetal bovine serum (FBS)) containing 1,000 PC-3-RFP cells.

[0647] The samples were run through the CTC0 Capture System Prototype at −2000 Pa for 15 hours as described above. The cells were washed with 1×DPBS for 15 minutes and imaged on the chip using an Olympus 1×71 inverted fluorescence microscope (Olympus, Tokyo, Japan), using bright field illumination and red fluorescence detection. Images were captured with an attached MicroFire® True Color Firewire microscope digital charge-coupled device camera (Optronics, Goleta, Calif., USA). RFP-positive cells were detected on the chip indicating that CTCs can be isolated from the spiked GBM sample.

[0648] 5. Capture and Immunostaining of CTCs from Healthy Mouse Whole Blood Spiked with PC-3 Tumor Cells

[0649] Peripheral blood samples were obtained from a healthy nu/nu mouse. 0.1 mL of the peripheral blood sample was spiked with 10 μL of DMEM-10 (DME containing 10% fetal bovine serum (FBS)) containing 1,000 PC-3-RFP cells. The samples were run through the CTC0 Capture System Prototype at −2000 Pa for 1 hour as described above. The microchip captured cells were then immunostained for cytokeratin to confirm the epithelial identity of the cells.

[0650] For immunostaining directly on the chip, the flow pressure was adjusted to −200 Pa. The cells were fixed with 4% paraformaldehyde (PFA) for 30 minutes, washed with 1×DPBS for 30 minutes, permeabilized in 20% methanol for 30 minutes, and then washed with 1×DPBS for 30 minutes. The fixed cells were then blocked with 10% goat serum for 30 minutes and stained with FITC-conjugated anti-cytokeratin antibody cocktail (anti-CK8-FITC (eBioscience, Cat. 11-9938), anti-CK18-FITC (Sigma, Cat. F4772), and anti-CK19-FITC (eBioscience, Cat. 11-9898)) for 1 hour. The cells were washed and then stained with 5 μg/mL Hoechst dye for 30 minutes.

[0651] Cells were imaged on the chip using an Olympus 1×71 inverted fluorescence microscope (Olympus, Tokyo, Japan), using bright field illumination and green and red fluorescence detection. Images were captured with an attached MicroFire® True Color Firewire microscope digital charge-coupled device camera (Optronics, Goleta, Calif., USA). The captured cells were positive for cytokeratin staining and RFP, indicating that the captured cells are CTCs and not blood cells. CTC identity also was confirmed by morphological analysis of the phase contrast images of the captured cells and Hoechst staining of the cell nuclei.

### Example 12

### Monitoring GLV-1h68 Therapy by Circulating Tumor Cell (CTC) Capture and Analysis

[0652] In this example, PC-3-RFP xenograft tumors were developed in 6-wk-old male nude mice by implanting 5×10⁶ PC-3-RFP cells subcutaneously on the right hind leg. At 48 days after tumor cell implantation, groups of 6 mice each were injected with a single intravenous (tail vein) dose of 5×10⁶ pfu GLV-1h68 in 100 μL PBS or 100 μL PBS only (n=3 for each treatment group). Blood was collected weekly from each mouse via cardiac puncture, and 80 μL of the blood was run through the biochip at −2000 Pa as described in Example 11 to capture and analyze CTCs. The progress of tumor development and the net body weight of the mice also were measured over time post-treatment to compare CTC observations with other symptoms of tumor/disease progression.

[0653] First, blood samples were analyzed to determine if GLV-1h68 treatment resulted in changes in the amount of captured CTCs. The % change in captured CTCs from weeks 0-4 post treatment from 80 μL blood are set forth in Table 6. By the second week post treatment (62 days post cell injection), CTCs completely disappeared in two out of three GLV-1h68-treated mice, whereas the PBS treated group maintained an average of nearly 78% more CTCs when compared to the number of CTCs detected before treatment.

[0654] Captured CTCs also were analyzed for GLV-1h68 infection at one week after GLV-1h68 treatment by overlaying images taken in the RFP and GFP fluorescence channels using an Olympus 1×71 inverted fluorescence microscope (Olympus, Tokyo, Japan) equipped with a MicroFire® True Color Firewire microscope and a digital charge-coupled device camera (Optronics, Goleta, Calif., USA). Detection of GFP signal indicated infection of the CTCs with GLV-1h68, which encodes the Ruc-GFP fusion protein (see Example 5 and U.S. Pat. Pub. No. US2005/0031643). As expected, no GFP fluorescence was detected in the PBS control group. Co-localization of RFP and GFP signals revealed that 78% of CTCs in mice bearing PC-3-RFP tumors are infected with GLV-1h68 within one week post treatment.

[0655] Next, the relative changes in PC-3-RFP tumor volumes were determined, using caliper measurement at the site of tumor cell implantation on a weekly basis (0-5 weeks), for animals treated with GLV-1h68 and compared to those of PBS-treated control animals. Results reporting the average relative change in tumor volume (compared to 48 days post tumor cell injection) are provided in Table 6. PBS-treated animals displayed a steadily increasing average change in tumor volume throughout the course of the study, reaching a final volume increase of 300% at 28 dpi (76 days after tumor implantation). The average change in tumor volume GLV-1h68-treated animals increased to an average of 100% at 7 dpi (55 days post tumor implantation) and remained at that level 14 dpi and then decreased at 21 and 28 dpi until the end of the study.

[0656] Because tumor-implanted animals often undergo dramatic weight loss over time, the relative net body weight change was measured for each animal on a weekly basis from 0 to 4 weeks post viral treatment. The three treatment groups measured were: GLV-1h68-treated, PC-3-RFP injected animals; PBS-control, PC-3-RFP animals, and PBS control animals without tumor burden. Results are presented in Table 6. Animals receiving only PBS and no PC-3 cells exhibited no relative change in net body weight percentage. PBS-treated PC-3 tumor-bearing animals exhibited a progressive loss in net body weight over the course of the study. By the end of the study, these animals exhibited an average weight loss of 15% net body weight. The average relative body weight for GLV-1h68-treated tumor-burdened animals decreased by about 11% in the first week post-treatment, but then recovered to about a 4% loss in body weight by the second week post viral treatment. The 4% body loss was maintained through the remainder of the study.

[0657] The mice used in this study also were qualitatively assessed for general appearance.

[0658] GLV-1h68-treated mice had a generally overall healthier appearance than PBS-treated mice.

TABLE 6
Percent change CTCs ± SEM

| Time post | Relative Change in Number | | Relative Change in | | Relative Change in Net | |
|---|---|---|---|---|---|---|
| treatment | of CTCs (%) | | Tumor Volume (%) | | Body Weight (%) | |
| (days) | PBS Control | GLV-1h68 | PBS Control | GLV-1h68 | PBS Control | GLV-1h68 |
| 0 | 0 | 0 | 0 | 0 | 0 | 0 |
| 7 | 77.9 ± 94.3 | 170.9 ± 121.4 | 65.9 ± 67.7 | 80.5 ± 12.4 | −4.1 ± 8.6 | −11.2 ± 13.3 |
| 14 | 163.9 ± 159.5 | −6.7 ± 92.5 | 98.5 ± 128.9 | 99.7 ± 11.3 | −11.4 ± 8.9 | −3.7 ± 11.3 |
| 21 | 77.5 ± 145.0 | 0.0 ± 173.2 | 208.7 ± 205.1 | 99.7 ± 72.4 | −15.2 ± 4.6 | −3.5 ± 16.3 |

### Example 13

### Effect of EDTA on GLV-1h68 Infectivity and Replication

[0659] Because patient blood collection tubes necessarily contain anti-coagulants, such as the chelating agent ethylenediaminetetraacetic acid (EDTA), it was necessary to determine if this reagent has any adverse effects on GLV-1h68 activity. Therefore, the infectivity and replication of GLV-1h68 were tested in the presence of varying concentrations of EDTA. EDTA blood collection tubes used in the study contain 4.8 mM EDTA when filled.

[0660] To show the effect of EDTA on virus infectivity, 1×10⁷ pfu GLV-1h68 were added to DMEM-2 containing different concentrations of EDTA-Na₂ (0, 0.2, 1, 4.8, and 48 mM) in triplicate and incubated at 37° C. for 1 hour. The virus was then titrated in CV-1 cells by standard plaque assay. EDTA had no effect on GLV-1h68 infectivity up to 4.8 mM. The infectivity of the virus incubated in 48 mM EDTA was reduced to one half of that achieved in the presence of lesser EDTA concentrations.

[0661] The effect of EDTA on GLV-1h68 replication in tumor cells also was tested. 8×10⁴ PC-3-RFP cells were suspended in 0.5 mL DMEM-2 containing 0, 0.2, 1, 4.8, or 48 mM EDTA-Na₂. GLV-1h68 was added at a multiplicity of infection (MOI) of 0.01 or 10 in triplicate and incubated at 37° C. The infected cells were harvested at 24, 48 and 72 hours post infection. The viral titer was then measured using CV-1 cells by standard plaque assay.

[0662] At MOI of 0.01, the starting titer of GLV-1h68 was about 1×10⁴ pfu/10⁶ cells. In the presence of 4.8 mM EDTA, the titer remained constant at about 1×10⁴ pfu/10⁶ cells over the course of the study. For lower EDTA concentrations (e.g. 0.2 mM and 1 mM) and the no EDTA control sample, the virus exhibited steadily increasing viral titers over time. In the presence of 48 mM EDTA, no virus was recovered at all time points tested.

[0663] At MOI of 10, the starting titer of GLV-1h68 was about 1×10⁷ pfu/10⁶ cells. In the presence of 4.8 mM EDTA, the viral titer again remained constant at about 1×10⁷ pfu/10⁶ cells up to 72 hr. In the presence of 0, 0.2 mM or 1 mM EDTA, the viral titer increased to about 1×10⁸ pfu/10⁶ cells at 24 hr, and remained at that titer at 48 and 72 hours post infection. Incubation in the presence of 48 mM EDTA resulted in decreasing viral titer over time to 1×10⁶ pfu/10⁶ at 24 hours post infection and further decreasing to about 5×10⁵ pfu/10⁶ at 48 and 72 hours post infection.

[0664] These results indicate that at concentrations of EDTA present in standard blood collection tubes, vaccinia virus infectivity and replication were not negatively affected.

### Example 14

### Identification of Circulating Tumor Cells (CTCs) using GLV-1h68

[0665] In this example, experiments were performed to analyze the use of GLV-1h68 for detection of CTCs in a sample. The ability of GLV-1h68 to specifically infect circulating tumor cells and the capture of GLV-1h68-infected CTCs was demonstrated.

### A. Specificity of Tumor Cell Infection

[0666] To show that GLV-168 specifically infects tumor cells, but not other cells contained within blood, blood was drawn from a normal mouse into an EDTA blood collection tube. 100 μL of blood was transferred to a new 1.5 mL microcentrifuge tube. The blood was then spiked with 10 μL of a PC-3-RFP suspension (2.475×10⁵ cells/mL). 1 mL DMEM-2 was then added to the blood/PC-3-RFP cell mixture, and the sample was subjected to centrifugation at 1,000×g for 5 min to pellet the cells. The supernatant was removed and the cells were resuspended in 100 μl DMEM-2. 10 μL it of GLV-1h68 (1.84×10⁹ pfu/mL) was added to the cell suspension and the tube was incubated at 37° C. in a CO₂ incubator 15 hours. The infected cells were transferred into a well of a 24-well plate and visualized using an Olympus 1×71 inverted fluorescence microscope (Olympus, Tokyo, Japan). Images were taken using a MicroFire® True Color Firewire microscope digital charge-coupled device camera (Optronics, Goleta, Calif., USA) using bright field illumination to reveal the location of PC-3-RFP and normal cells, RFP fluorescence to identify the tumor cells, and GFP fluorescence to identify GLV-1h68-infected cells. Overlaying the images demonstrated that GLV-1h68 specifically infected the tumor cells and did not infect normal cells within the mouse blood.

### B. Biochip Capture of Infected Tumor Cells Following In Vitro GLV-1h68 Infection

[0667] GLV-1h68-infected mouse blood was run through the Clearbridge microfiltration biochip at −2000 Pa (see Example 11) to show that the biochip captures tumor cells in blood infected with GLV-1h68 in vitro. 40 μL of the GLV-1h68-infected cell suspension from part A above were run through the ClearBridge biochip described in Example 11. Pictures of the biochip containing captured cells were taken using an Olympus inverted fluorescence microscope, equipped with a digital camera as described in part A above, using bright field illumination and RFP and GFP fluorescence. Images of biochip-captured cells showed overlap of the RFP and GFP signals, demonstrating capture of GLV-1h68-infected tumor cells.

C. GLV-1h68 Infection of Tumor-Like Cells from a Gastric Cancer Patient

[0668] To determine whether GLV-1h68 could infect tumor-like cells in a sample from a tumor-bearing patient, 1 mL of cerebral spinal fluid (CSF) from a patient with advanced gastric cancer, which had metastasized to the brain, was dispensed in a well of a 24-well tissue culture plate, and infected with 10 μL of GLV-1h68 (1.84×10⁹ pfu/ml) 15 hours. Pictures of infected tumor-like cells were taken as described in part A above, using bright field illumination and GFP fluorescence. Images revealed that that the tumor-like cells were infected with GLV-1h68.

### D. In Situ GLV-1h68 Infection of CTCs Captured on a Microfiltration Biochip

[0669] Peripheral blood samples were obtained from a healthy nu/nu mouse. 0.1 mL of the peripheral blood sample was spiked with 10 μL of DMEM-10 (DME containing 10% fetal bovine serum (FBS)) containing 1,000 PC-3-RFP cells. The samples were run through the CTC0 Capture System Prototype at −2000 Pa for 1 hour as described above. The biochip was then washed with DMEM containing 2% FBS for 15 min. The captured cells were infected with 1 mL GLV-1h68 at the concentration of 1×10⁶ pfu/mL and incubated in 37° C. for 36 hours. The cells were then imaged on the chip using an Olympus 1×71 inverted fluorescence microscope (Olympus, Tokyo, Japan), using bright field illumination and green and red fluorescence detection. Images captured with an attached MicroFire® True Color Firewire microscope digital charge-coupled device camera (Optronics, Goleta, Calif., USA) revealed that RFP positive cells also were GFP positive indicating infection of the PC-3-RFP cells by GLV-1h68. GFP expression following virus infection on the chip was slightly delayed compared to virus infection prior to running on the chip due to fluidic stress on the cells.

### Example 15

### In Situ GLV-1h68-Infection of Parylene Microfilter Biochip-Captured Cells

[0670] In this example, the USC biochip and CTC detection platform, as described in Xu et al. (2010) Cancer Res 70(16):6420-6426 and U.S. Pat. Pub. No. 2011/0053152, was used to capture tumor and tumor-like cells. The USC biochip system captures tumor and tumor-like cells by size segregation on a parylene-C slot microfilter, using a constant low pressure delivery system. The USC chip employed was 6 mm×6 mm in total size with a membrane thickness of 10 μm and an optimized slot size of 6 μm×40 μm. The ability of GLV-1h68 to infect USC biochip-captured cells in situ was shown using this system.

### A. In Situ GLV-1h68 Infection of Captured GI-101A Cells

[0671] Cells of the metastatic breast tumor cell line, GI-101A (Dr. A. Aller, Rumbaugh-Goodwin Institute for Cancer Research, Inc.) were cultured in RPMI 1640 supplemented with 5 ng/mL of β-estradiol and progesterone (Sigma, St. Louis, Calif.), 10 mmol/L HEPES, 1 mmol/L sodium pyruvate, 20% fetal bovine serum (FBS; Mediatech, Inc., Manassas, Va.), and 1% antibiotic-antimycotic solution (Mediatech, Inc., Manassas, Va.) at 37° C. under 5% CO₂. The GI-101A cells (100 cells) were suspended in 2 mL Dulbecco's Phosphate Buffered Saline (DPBS), and run through the USC biochip over 10 minutes. The biochip with captured cells was then immersed into 0.5 mL DMEM2 containing 1×10⁶ pfu/mL GLV-1h68 and incubated 15 hours at 37° C. in a CO₂ incubator. Cells were examined for GLV-1h68 infection by imaging the chip using an Olympus 1×71 inverted fluorescence microscope (Olympus, Tokyo, Japan), using bright field illumination and green fluorescence detection. Images captured with an attached MicroFire® True Color Firewire microscope digital charge-coupled device camera (Optronics, Goleta, Calif., USA) revealed GFP-positive GI-101A cells, indicating in situ GLV-1h68 infection of captured cells.

B. In Situ Infection of Captured Tumor-Like Cells from a Gastric Cancer Patient

[0672] To show that tumor-like cells from a patient with advanced gastric cancer can be infected with GLV-1h68 in situ, following capture by the USC biochip, 2 mL of cerebral spinal fluid from a patient with metastatic gastric cancer were run through a USC biochip. The chip with captured cells was then incubated in 0.5 mL DMEM containing 1×10⁶ pfu GLV-1h68/ml, in a well of a 24-well plate. The chip was incubated and imaged as described in part A above. Analysis of the captured cells by bright field microscopy revealed that the USC biochip captured a mixture of small and large cells. GLV-1h68-infected cells, detectable by GFP fluorescence, indicated that the larger, tumor-like cells were successfully infected in situ.

[0673] The GLV-1h68-infected cells were further analyzed by staining nuclei with 4′,6-diamidino-2-phenylindole (DAPI) and by immunofluorescence using antibodies directed against carcinoembryonic antigen (CEA), which is glycoprotein involved in cell adhesion that is upregulated in cancer and is employed as a marker for identification of tumor cells. The infected cells were fixed with 4% paraformaldehyde for 10 min at room temperature, washed with DPBS, and incubated with PE-conjugated anti-CEA antibody (1:100 dilution, BD Biosciences)/DAPI (5 μg/mL) for one hour at room temperature. Imaging was performed as described above using an Olympus 1×71 inverted fluorescence microscope (Olympus, Tokyo, Japan) equipped with a MicroFire® True Color Firewire microscope digital charge-coupled device camera (Optronics, Goleta, Calif., USA). Comparing bright field, GFP, DAPI, and CEA immunofluorescent images showed that the GLV-1h68 (GFP-positive) cells also were CEA-positive, indicating that the infected cells were tumor cells.

### Example 16

### In Situ GLV-1h68-Infection of CellSieve™ Microfilter Captured Cells

### A. CellSieve™ MicroFilter Capture and Immunostaining of PC-3 Tumor Cells

[0674] 1,000 PC-3-RFP cells in 10 μL were added to 1 mL 1×DPBS and processed by CellSieve™ Microfilters (Creatv MicroTech, Inc. Potomac, Md.). The CellSieve™ microfilter is a polymer filter that has a thickness of 10 μm and contains rows of pores, 7-8 μm in diameter, with a pore periodicity of 20 μm. Adjacent rows of pores are offset by 10 μm.

[0675] The 1 mL sample was placed into a syringe attached to a filter holder containing the microfilter. The sample was drawn through the filter by negative pressure according to the manufacturer's instructions. The microfilter was remove from the filter holder and place in microwell plate for staining. The captured cells were fixed with fixation buffer (Creatv MicroTech, Inc.) for 20 minutes, permeabilized in permeabilization buffer (Creatv MicroTech, Inc.) for 20 minutes and washed with 1×DPBS. The cells were then stained with FITC-conjugated anti-cytokeratin antibody cocktail (anti-CK8-FITC (eBioscience, Cat. 11-9938), anti-CK18-FITC (Sigma, Cat. F4772), and anti-CK19-FITC (eBioscience, Cat. 11-9898)) and 5 μg/mL Hoechst solution for 1 hour and then washed with 1×DPBS. The filter was transferred onto a microscope slide and imaged on the filter using an Olympus 1×71 inverted fluorescence microscope (Olympus, Tokyo, Japan), using bright field illumination and green and red fluorescence detection. Images were captured with an attached MicroFire® True Color Firewire microscope digital charge-coupled device camera (Optronics, Goleta, Calif., USA). Imaging showed that CTCs can be captured by the chip at ˜60% capture efficiency and the cells that are captured also are cytokeratin positive.

### B. In Situ GLV-1h68 Infection of Captured PC-3 Cells

[0676] 1,000 PC-3-RFP cells in 10 μl were added to 1 mL 1×DPBS and processed by CellSieve™ Microfilters (Creatv MicroTech, Inc. Potomac, Md.) as described in Part A. After the cells were captured, the filter was placed in a well of a 24-well with 0.2 mL DMEM-2% FBS containing 1×10⁶ pfu GLV-1h68. The plate was incubated at 37° C. in a CO₂ incubator (5% CO₂) for 15 hours. Then the filter was transferred onto a microscope slide and imaged on the filter using an Olympus 1×71 inverted fluorescence microscope (Olympus, Tokyo, Japan), using bright field illumination and green and red fluorescence detection. Images were captured with an attached MicroFire® True Color Firewire microscope digital charge-coupled device camera (Optronics, Goleta, Calif., USA). The RFP positive cells captured by the microfilter also were positive for GFP expression indicating that the GLV-1h68 virus can infect CTCs in situ on the microfilter.

C. In Situ GLV-1h68 Infection of Captured CTCs from Mice Bearing a PC-3 Xenograft Tumor

[0677] Mice were subcutaneously injected with 5×10⁶PC-3-RFP cells in the right hind leg. At 44 days after tumor cell implantation, blood was drawn from the mouse via cardiac puncture, and 100 μL of the extracted blood was processed by a CellSieve™ Microfilter as described in Part A. After the cells were captured, the filter was placed in a well of a 24-well with 0.2 mL DMEM-2% FBS containing 1×10⁶ pfu GLV-1h68. The plate was incubated at 37° C. in a CO₂ incubator (5% CO₂) for 15 hours. Then the microfilter was transferred onto a slide and imaged on the filter using an Olympus 1×71 inverted fluorescence microscope (Olympus, Tokyo, Japan), using bright field illumination and green and red fluorescence detection. Images were captured with an attached MicroFire® True Color Firewire microscope digital charge-coupled device camera (Optronics, Goleta, Calif., USA). The RFP positive cells captured by the microfilter also were positive for GFP expression indicating that the GLV-1h68 virus can infect CTCs in situ on the microfilter.

### Example 17

[0678] Generation of TurboFP635 Vaccinia Virus Strains

[0679] In this Example vaccinia virus strains expressing the far-red fluorescent protein TurboFP635 (scientific name “Katushka”) from the sea anemone Entacmaea quadricolor (Shcherbo et al. (2007) Nat Methods 4(9):741-746) were generated. TurboFP635 has an excitation/emission maxima at 588/635 nm and is 7 to 10-fold brighter compared to other far-red fluorescent proteins such as HcRed (Gurskaya et al. (2001) FEBS Lett. 507(1):16-20) or mPlum (Wang et al. (2004) Proc Natl Acad Sci USA. 101 (48):16745-16749). TurboFP635 also exhibits a fast maturation rate which makes it useful for expression by vaccinia virus for rapid detection of infected CTCs. In addition, the excitation/emission profile for TurboFP635 minimizes autofluorescence for imaging CTCs directly on microfilters and biochips (e.g. microfluidic devices).

### A. Construction of Modified Vaccinia Viruses

[0680] Modified vaccinia viruses containing DNA encoding TurboFP635 (SEQ ID NO:21 (protein); SEQ ID NO:20 (DNA)) were generated by removing and inserting nucleic acid at the hemagglutinin (HA) gene locus in a vaccinia virus genome. The heterologous DNA inserted into the virus genome included expression cassettes containing protein-encoding DNA operably linked to a vaccinia virus promoter.

[0681] The starting strains used for the construction of the modified vaccinia viruses were vaccinia virus (VV) strain GLV-1h68 (also named RVGL21, SEQ ID NO:1) and GLV-1h71 (see U.S. Patent Publication No. US2009/0098529). GLV-1h68, contains DNA insertions in the F14.5L, thymidine kinase (TK) and hemagglutinin (HA) genes and is described in U.S. Patent Publication No. 2005/0031643. GLV-1h71 is a derivative strain of GLV-1h68, that contains DNA insertions in the thymidine kinase (TK) and hemagglutinin (HA) genes and a deletion of the insertion at the F14.5L locus.

[0682] GLV-1h68 was prepared from the vaccinia virus strain designated LIVP, which is a vaccinia virus strain, originally derived by adapting the vaccinia Lister strain (ATCC Catalog No. VR-1549) to calf skin (Research Institute of Viral Preparations, Moscow, Russia, Al'tshtein et al. (1983) Dokl. Akad. Nauk USSR 285:696-699). The LIVP strain, whose genome sequence is set forth in SEQ ID NO:2 and from which GLV-1h68 was generated, contains a mutation in the coding sequence of the TK gene, in which a substitution of a guanine nucleotide with a thymidine nucleotide (nucleotide position 80207 of SEQ ID NO:2) introduces a premature STOP codon within the coding sequence.

[0683] As described in U.S. Patent Publication No. 2005/0031643 (see, particularly, Example 1 of the application), GLV-1h68 was generated by inserting expression cassettes encoding detectable marker proteins into the F14.5L (also referred to as F3; see U.S. Patent Publication No. 2005/0031643), thymidine kinase (TK; J2R), and hemagglutinin (HA; A56R) gene loci of the vaccinia virus LIVP strain. Specifically, an expression cassette containing a Ruc-GFP cDNA (a fusion of DNA encoding Renilla luciferase and DNA encoding GFP) under the control of a vaccinia synthetic early/late promoter P_{SEL} was inserted into the F14.5L gene; an expression cassette containing DNA encoding beta-galactosidase under the control of the vaccinia early/late promoter P_{7.5k} (denoted (P_{7.5k})LacZ) and DNA encoding a rat transferrin receptor positioned in the reverse orientation for transcription relative to the vaccinia synthetic early/late promoter P_{SEL} (denoted (P_{SEL})rTrfR) was inserted into the TK gene (the resulting virus does not express transferrin receptor protein since the DNA encoding the protein is positioned in the reverse orientation for transcription relative to the promoter in the cassette); and an expression cassette containing DNA encoding β-glucuronidase under the control of the vaccinia late promoter P₁₁ₖ (denoted (P₁₁ₖ)gusA) was inserted into the HA gene.

[0684] Insertion of the expression cassettes into the LIVP genome to generate the GLV-1h68 strain resulted in disruption of the coding sequences for each of the F14.5L, TK and HA genes. Accordingly, all three genes in the resulting strains are nonfunctional in that they do not encode the corresponding full-length proteins. As described in U.S. Patent Publication No. 2005/0031643, disruption of these genes not only attenuates the virus, but also enhances its tumor-specific accumulation. Previous data have shown that systemic delivery of the GLV-1h68 virus in a mouse model of breast cancer resulted in the complete eradication of large subcutaneous GI-101A human breast carcinoma xenograft tumors in nude mice (see U.S. Patent Publication No. 2005/0031643).

[0685] As described in U.S. Patent Publication No. US2009/0098529 (see, particularly, Example 1 of the application), GLV-1h71 was generated by insertion of short non-coding nucleic acid in place of the Ruc-GFP expression cassette at the F14.5L locus of GLV-1h68.

[0686] 1. Modified Viral Strains

[0687] Modified recombinant vaccinia viruses containing heterologous DNA inserted into one or more loci of the vaccinia virus genome were generated via homologous recombination between DNA sequences in the vaccinia virus genome and a transfer vector, using methods described herein and known to those of skill in the art (see, e.g., Falkner and Moss (1990) J. Virol. 64:3108-2111; Chakrabarti et al. (1985) Mol. Cell. Biol. 5:3403-3409; and U.S. Pat. No. 4,722,848). In these methods, the existing target gene in the starting vaccinia virus genome is replaced by an interrupted copy of the gene contained in the transfer vector through two crossover events: a first crossover event of homologous recombination between the vaccinia virus genome and the transfer vector and a second crossover event of homologous recombination between direct repeats within the target locus. The interrupted version of the target gene that is in the transfer vector contains the insertion DNA flanked on each side by DNA corresponding to the left portion of the target gene and right portion of the target gene, respectively. The transfer vector also contains a dominant selection marker, e.g., the E. coli guanine phosphoribosyltransferase (gpt) gene, under the control of a vaccinia virus early promoter (e.g., P_{7.5kE}). Including such a marker in the vector enables a transient dominant selection process to identify recombinant virus grown under selective pressure that has incorporated the transfer vector within its genome. Because the marker gene is not stably integrated into the genome, it is deleted from the genome in a second crossover event that occurs when selection is removed. Thus, the final recombinant virus contains the interrupted version of the target gene as a disruption of the target loci, but does not retain the selectable marker from the transfer vector.

[0688] Homologous recombination between a transfer vector and a starting vaccinia virus genome occurred upon introduction of the transfer vector into cells that have been infected with a starting vaccinia virus, GLV-1h68 or GLV-1h71. A series of transfer vectors was constructed as described below and the following modified vaccinia strains were constructed: GLV-1h188 (SEQ ID NO:3), GLV-1h189 (SEQ ID NO:4), GLV-1h190 (SEQ ID NO:5), GLV-1h253 (SEQ ID NO:6), and GLV-1h254 (SEQ ID NO:7). The oncolytic reporter virus GLV-1h86, which is described herein and in U.S. Patent Publication 2009/0098529, is a reporter virus that expresses the Ruc-GFP fusion protein and also exhibits a high replication rate and was also employed for in vitro infection. The construction of these strains is summarized in the following Table, which lists the modified vaccinia virus strains, including the previously described GLV-1h68, their respective genotypes, and the transfer vectors used to engineer the viruses:

TABLE 7
Generation of engineered vaccinia viruses

| Name of | Parental | VV Transfer | |
|---|---|---|---|
| Virus | Virus | Vector | Genotype |
| GLV-1h68 | — | — | F14.5L: (P_{SEL})Ruc-GFP |
| | | | TK: (P_{SEL})rTrfR-(P_{7.5k})LacZ |
| | | | HA: (P₁₁ₖ)gusA |
| GLV-1h72 | GLV-1h68 | pCR-TKLR-gpt2 | F14.5L: (P_{SEL})Ruc-GFP |
| | | | TK: SacI-BamHI |
| | | | HA: (P₁₁ₖ)gusA |
| GLV-1h86 | GLV-1h72 | pNCVVhaT | F14.5L: (P_{SEL})Ruc-GFP |
| | | | TK: Sac I-BamHI |
| | | | HA: Hind III-BamHI |
| GLV-1h188 | GLV-1h68 | HA-SE-FUKW2 | F14.5L: (P_{SEL})Ruc-GFP |
| | | | TK: (P_{SEL})rTrfR-(P_{7.5k})LacZ |
| | | | HA: (P_{SE})FUKW |
| GLV-1h189 | GLV-1h68 | HA-SEL-FUKW4 | F14.5L: (P_{SEL})Ruc-GFP |
| | | | TK: (P_{SEL})rTrfR-(P_{7.5k})LacZ |
| | | | HA: (P_{SEL}) FUKW |
| GLV-1h190 | GLV-1h68 | HA-SL-FUKW2 | F14.5L: (P_{SEL})Ruc-GFP |
| | | | TK: (P_{SEL})rTrfR-(P_{7.5k})LacZ |
| | | | HA: (P_{SL}) FUKW |
| GLV-1h71 | | | F14.5L: ko |
| | | | TK: (P_{SEL})rTrfR-(P_{7.5k})LacZ |
| | | | HA: (P₁₁ₖ)gusA |
| GLV-1h253 | GLV-1h71 | HA-SE-FUKW2 | F14.5L: ko |
| | | | TK: (P_{SEL})rTrfR-(P_{7.5k})LacZ |
| | | | HA: (P_{SE}) FUKW |
| GLV-1h254 | GLV-1h71 | HA-SL-FUKW-2 | F14.5L: ko |
| | | | TK: (P_{SEL})rTrfR-(P_{7.5k})LacZ |
| | | | HA: (P_{SL}) FUKW |

[0689] GLV-1h188 (SEQ ID NO:3) was generated by insertion of an expression cassette encoding TurboFP635 (far-red fluorescent protein “Katushka”'; FUKW) under the control of the vaccinia P_{SE} promoter into the HA locus of starting strain GLV-1h68 thereby deleting the gusA expression cassette at the HA locus of starting GLV-1h68. Thus, in strain GLV-1h188, the vaccinia HA gene is interrupted within the coding sequence by a DNA fragment containing DNA encoding TurboFP635 operably linked to the vaccinia synthetic early promoter.

[0690] GLV-1h189 (SEQ ID NO:4) was generated by insertion of an expression cassette encoding TurboFP635 under the control of the vaccinia P_{SEL} promoter into the HA locus of starting strain GLV-1h68 thereby deleting the gusA expression cassette at the HA locus of starting GLV-1h68. Thus, in strain GLV-1h189, the vaccinia HA gene is interrupted within the coding sequence by a DNA fragment containing DNA encoding TurboFP635 operably linked to the vaccinia synthetic early late promoter.

[0691] GLV-1h190 (SEQ ID NO:5) was generated by insertion of an expression cassette encoding TurboFP635 under the control of the vaccinia P_{SL} promoter into the HA locus of starting strain GLV-1h68 thereby deleting the gusA expression cassette at the HA locus of starting GLV-1h68. Thus, in strain GLV-1 h190, the vaccinia HA gene is interrupted within the coding sequence by a DNA fragment containing DNA encoding TurboFP635 operably linked to the vaccinia synthetic late promoter.

[0692] GLV-1h253 (SEQ ID NO:6) was generated by insertion of an expression cassette encoding TurboFP635 under the control of the vaccinia P_{SE} promoter into the HA locus of starting strain GLV-1h71 thereby deleting the gusA expression cassette at the HA locus of starting GLV-1h71. Thus, in strain GLV-1h253, the vaccinia HA gene is interrupted within the coding sequence by a DNA fragment containing DNA encoding TurboFP635 operably linked to the vaccinia synthetic early promoter.

[0693] GLV-1h254 (SEQ ID NO:7) was generated by insertion of an expression cassette encoding TurboFP635 under the control of the vaccinia P_{SL} promoter into the HA locus of starting strain GLV-1h71 thereby deleting the gusA expression cassette at the HA locus of starting GLV-1h71. Thus, in strain GLV-1h254, the vaccinia HA gene is interrupted within the coding sequence by a DNA fragment containing DNA encoding TurboFP635 operably linked to the vaccinia synthetic late promoter.

[0694] 2. VV Transfer Vectors Employed for the Production of Modified Vaccinia Viruses

[0695] a. HA-SE-FUKW2: For Insertion of an Expression Cassette Encoding FUKW Under the Control of the Vaccinia P_{SE} Promoter into the Vaccinia HA locus

[0696] The HA-SE-FUKW2 transfer vector (SEQ ID NO:13) was employed to create vaccinia virus strain GLV-1h188 (SEQ ID NO:3), having the following genotype: F14.5L: (P_{SEL})Ruc-GFP, TK: (P_{SEL})rTrfR-(P_{7.5k})LacZ, HA: (P_{SE})FUKW, and vaccinia virus strain GLV-1h253 (SEQ ID NO: 6), having the following genotype: F14.5L: ko, TK: (P_{SEL})rTrfR-(P_{7.5k})LacZ, HA: (P_{SE})FUKW. HA-SE-FUKW2 contains the TurboFP635 (far-red fluorescent protein “Katushka”; FUKW) gene under the control of the vaccinia P_{SE} promoter, flanked by sequences of the HA gene.

[0697] To generate vector HA-SE-FUKW2, cDNA encoding TurboFP635 was PCR-amplified using plasmid FUKW (Dr. Marco J. Herold, University of Wurzburg) as the template with the following primers:

FUKW-5:
(SEQ ID NO: 8; SalI site underlined)
5′-GTCGACCACCATGGTGGGTGAGGATAGCGTGC-3′
FUKW-3:
(SEQ ID NO: 9; PacI site underlined)
5′-TTAATTAATCAGCTGTGCCCCAGTTTGC-3′.

[0698] The PCR product was gel-purified, and cloned into the pCR-Blunt II-TOPO vector (SEQ ID NO:17) using Zero Blunt TOPO PCR Cloning Kit (Invitrogen). The resulting construct pCRII-FUKW was sequence confirmed. The TurboFP635 cDNA was then released from pCRII-FUKW with SalI and PacI digestion, and subcloned into same cut vector HA-SE-hNET1 (SEQ ID NO: 10) to generate HA-SE-FUKW2 (SEQ ID NO:13). The resulting HA-SE-FUKW2 construct was confirmed by sequencing.

[0699] b. HA-SEL-FUKW4: For Insertion of an Expression Cassette Encoding FUKW Under the Control of the Vaccinia P_{SEL} Promoter into the Vaccinia HA Locus

[0700] The HA-SEL-FUKW4 transfer vector (SEQ ID NO:15) was employed to create vaccinia virus strain GLV-1 h189 (SEQ ID NO:4), having the following genotype: F14.5L: (P_{SEL})Ruc-GFP, TK: (P_{SEL})rTrfR-(P_{7.5k})LacZ, HA: (P_{SEL})FUKW. HA-SE-FUKW2 contains the TurboFP635 (FUKW) gene under the control of the vaccinia P_{SEL} promoter, flanked by sequences of the HA gene.

[0701] To generate vector HA-SEL-FUKW4, the TurboFP635 cDNA was released from pCRII-FUKW with SalI and PacI digestion, and subcloned into same cut vector HA-SEL-hNET2 (SEQ ID NO:11) to generate HA-SEL-FUKW4 (SEQ ID NO:15). The resulting HA-SE-FUKW4 construct was confirmed by sequencing.

[0702] c. HA-SL-FUKW2: For Insertion of an Expression Cassette Encoding FUKW Under the Control of the Vaccinia P_{SL} Promoter into the Vaccinia HA Locus

[0703] The HA-SL-FUKW2 transfer vector (SEQ ID NO:13) was employed to create vaccinia virus strain GLV-1h190 (SEQ ID NO:5), having the following genotype: F14.5L: (P_{SEL})Ruc-GFP, TK: (P_{SEL})rTrfR-(P_{7.5k})LacZ, HA: (P_{SL})FUKW, and vaccinia virus strain GLV-1h254 (SEQ ID NO:7), having the following genotype: F14.5L: ko, TK: (P_{SEL})rTrfR-(P_{7.5k})LacZ HA: (P_{SL})FUKW. HA-SL-FUKW2 contains the TurboFP635 (FUKW) gene under the control of the vaccinia Pₘ, promoter, flanked by sequences of the HA gene.

[0704] To generate vector HA-SL-FUKW2, the TurboFP635 cDNA was released from pCRII-FUKW with SalI and PacI digestion, and subcloned into same cut vector HA-SL-hNET1 (SEQ ID NO:12) to generate HA-SL-FUKW2 (SEQ ID NO:14). The resulting HA-SL-FUKW2 construct was confirmed by sequencing.

[0705] 3. Preparation of Recombinant Vaccinia Viruses

[0706] African green monkey kidney fibroblast CV-1 cells (American Type Culture Collection (Manassas, Va.); CCL-70) were employed for viral generation and production. The cells were grown in Dulbecco's modified Eagle's medium (DMEM) supplemented with 1% antibiotic-antimycotic solution (Mediatech, Inc., Herndon, Va.) and 10% fetal bovine serum (FBS; Mediatech, Inc., Herndon, Va.) at 37° C. under 5% CO₂. For virus generation of recombinant viruses, the CV-1 cells were infected with the parental virus GLV-1h68 or GLV-1h71 (see Table 7) at MOI of 0.1 for 1 hr. The infected cells were then transfected using Fugene (Roche, Indianapolis, Ind.) with the designated transfer vector (see Table 7 and description of viral transfer vectors above). At two days post infection, infected/transfected cells were harvested and the recombinant viruses were selected and plaque purified using standard methods as described previously (Falkner and Moss (1990) J. Virol. 64:3108-3111).

[0707] The genotype of the vaccinia viruses was verified by PCR and restriction enzyme digestion. The lack of expression of the gusA gene for GLV-1h188, GLV-1h189, GLV-1h190, GLV-1h253, and GLV-1h254 was confirmed by standard glucuronidase assay. In vitro infection assays were performed to compare fluorescent protein expression between vaccinia viruses that encode TurboFP635 and the parental GLV-1h68 vaccinia virus that encodes GFP. TurboFP635 and GFP were detectable in cells infected with the respective viruses. In addition, the TurboFP635 signal was stronger and detectable earlier than that of GFP following infection.

### B. Vaccinia Virus Purification

[0708] Ten T225 flasks of confluent CV-1 cells (seeded at 2×10⁷ cells per flask the day before infection) were infected with each virus at MOI of 0.1. The infected cells were harvested two days post infection and lysed using a glass Dounce homogenizer. The cell lysate was clarified by centrifugation at 1,800 g for 5 min, and then layered on a cushion of 36% sucrose, and centrifuged at 13,000 rpm in a HB-6 rotor, Sorvall RC-5B Refrigerated Superspeed Centrifuge for 2 hours. The virus pellet was resuspended in 1 mL of 1 mM Tris, pH 9.0, loaded on a sterile 24% to 40% continuous sucrose gradient, and centrifuged at 26,000 g for 50 min. The virus band was collected and diluted using 2 volumes of 1 mM Tris, pH 9.0, and then centrifuged at 13,000 rpm in a HB-6 rotor for 60 min. The final virus pellet was resuspended in 1 mL of 1 mM Tris, pH 9.0 and the titer was determined in CV-1 cells (ATCC No. CCL-70).

### Example 18

### Vaccinia Virus Infection of CTCs in Red Blood Cell (RBC) Cleared Samples

[0709] A. In Situ GLV-1h68 Infection of Captured PC-3 Tumor Cells from Spiked Blood Samples Following RBC Lysis

[0710] Peripheral blood samples were obtained from a healthy nu/nu mouse by cardiac puncture and collection in anti-coagulant EDTA tubes. 0.1 mL of the peripheral blood sample was transferred to 12×75 culture (VWR, Cat. 60818-565) and spiked with 10 μL of DMEM-10 (DME containing 10% fetal bovine serum (FBS)) containing 1,000 PC-3-RFP cells. Triplicate spiked samples were lysed for red blood cells by adding 1 mL 1×RBC lysis buffer (eBioscience, Cat. 00-4333) to each tube. The samples were incubated at room temperature for 5-10 minutes with occasional shaking. The lysis reaction was stopped by diluting the lysis buffer with 3 mL 1×DPBS (Mediatech, Cat. 10-090-CV) when the blood became clear. The cells were spun down at 300×g at 4° C. and the buffer was carefully removed. The cells were resuspended in 0.5 mL DMEM-2% FBS containing 1×10⁶ pfu GLV-1h68 and incubated at 37° C. in a CO₂ incubator (5% CO₂) 15 hours.

[0711] One sample was transferred to a well of a 24-well plate for imaging at 150× magnification on the plates using an Olympus 1×71 inverted fluorescence microscope (Olympus, Tokyo, Japan), using bright field illumination and green and red fluorescence detection. Images were captured with an attached MicroFire® True Color Firewire microscope digital charge-coupled device camera (Optronics, Goleta, Calif., USA).

[0712] The second sample was processed by a CellSieve™ Microfilter (Creatv MicroTech, Inc. Potomac, Md.) as described in Example 16. After cell capture, the microfilter was transferred onto a slide and imaged on the filters using an Olympus 1×71 inverted fluorescence microscope (Olympus, Tokyo, Japan), using bright field illumination and green and red fluorescence detection. Images were captured with an attached MicroFire® True Color Firewire microscope digital charge-coupled device camera (Optronics, Goleta, Calif., USA).

[0713] The third sample was run through the CTC0 Capture System Prototype (Clearbridge Biomedics Pte Ltd., Singapore) for 1 hour at −2000 Pa as described in Example 11, and the biochip was imaged on the chips using an Olympus 1×71 inverted fluorescence microscope (Olympus, Tokyo, Japan), using bright field illumination and green and red fluorescence detection. Images captured with an attached MicroFire® True Color Firewire microscope digital charge-coupled device camera (Optronics, Goleta, Calif., USA). RFP positive cells in the RBC cleared sample also were GFP positive indicating that GLV-1h68 efficiently infects CTCs in a sample that have been enriched via lysis of RBCs. In addition, RFP positive cells that were captured by either the CellSieve™ Microfilter or CTC Microfiltration Biochip following RBC lysis were GFP positive indicating that the CellSieve™ and CTC Biochip can capture CTCs infected with GLV-1h68 following RBC lysis.

B. GLV-1h190 Infection of CTCs in an RBC-cleared Peripheral Blood Sample from a Colorectal Cancer Patient

[0714] Peripheral blood samples were obtained from a human colorectal cancer patient. The blood sample was collected in anti-coagulated tubes and put in slow speed shaker at room temperature before processing. Aliquots of the blood sample were transferred to 50 mL Falcon tubes (1 mL/tube) and 10 mL 1×RBC lysis buffer (eBioscience, Cat. 00-4333) was added to each tube to lyse the RBCs. The sample was incubated for 10-15 minutes at room temperature with occasional shaking. The reaction was stopped by diluting the lysis buffer with 30 mL 1×DPBS (Mediatech, Cat. 10-090-CV) when the blood became clear. The remaining intact cells were spun down with 300×g at 4° C. and the buffer was carefully removed. The cells were resuspended in 1.5 mL DMEM-2% FBS containing 3.15×10⁶ pfu GLV-1h190, which encodes the far-red fluorescent protein TurboFP635 and the Ruc-GFP fusion protein (see Example 17), and incubated at 37° C. in a CO₂ incubator (5% CO₂) overnight.

[0715] The cells were then transferred to a well of a 6-well plate for imaging on the slides using an Olympus 1×71 inverted fluorescence microscope (Olympus, Tokyo, Japan), using bright field illumination and green and red fluorescence detection. Images were captured with an attached MicroFire® True Color Firewire microscope digital charge-coupled device camera (Optronics, Goleta, Calif., USA). CTCs expressing GFP and TurboFP635 were readily detectable by green and red fluorescence, respectively, indicating that GLV-1h190 can infect CTCs and permit their detection by green and red fluorescence.

C. GLV-1h254 Infection of CTCs in an RBC-Cleared Peripheral Blood Sample from a Metastatic Breast Cancer Patient

[0716] Peripheral blood samples were obtained from a human metastatic breast cancer patient. The RBCs in 1 mL of the blood sample were lysed as described in Part B. The remainder intact cells were pelleted with 300×g at 4° C., and the buffer was carefully removed. The cells were resuspended in 0.5 mL DMEM-2% FBS containing 1×10⁷ pfu GLV-1h254, which encodes the far-red fluorescent protein TurboFP635 (see Example 17), and incubated at 37° C. in a CO₂ incubator (5% CO₂) overnight.

[0717] The cells were then spun with 300×g at 4° C. and resuspended in 4% PFA to fix the samples for 30 minutes. The cells were spun down again and washed with 1×DPBS. The samples were incubated with FITC-conjugated EpCAM antibody diluted in 10% goat serum for 30 minutes. The samples were washed with 1×DPBS and stained with Hoechst dye. The stained samples were then washed with 1×DPBS, spun down, resuspended in 1×DPBS, and filtered through a CellSieve™ Microfilter (Creatv MicroTech, Inc. Potomac, Md.) as described in Example 16. After cell capture, the microfilter was transferred onto a slide and imaged under a microscope as described above. Phase contrast, blue, green and red fluorescent images were recorded. CTCs captured by the microfilter were positive for EpCAM expression as detected by green fluorescence and TurboFP635 expression as detected by far-red fluorescence. This indicated that the infected cells captured by the microfilter are CTCs.

### Example 19

### Detection of CTCs in Patient Sample by RBC Lysis and Cytospin

[0718] A. Detection of CTCs in a Peripheral Blood Sample from a Lung Cancer Patient

[0719] Peripheral blood samples were obtained from a human lung cancer patient. 0.5 mL aliquots of the blood sample were lysed for RBCs as described in Example 18. The remainder intact cells were pelleted with 300×g at 4° C., and the buffer was carefully removed. The RBC-cleared samples were tested for background staining, cytokeratin staining alone, and vaccinia virus infection with cytokeratin staining as indicated below.

[0720] To test for background autofluorescence, a first sample of RBC-cleared cells was resuspended in 0.5 mL DMEM-2% FBS and incubated at 37° C. in a CO₂ incubator (5% CO₂) overnight. The cells were then loaded onto assembled cytology funnels (VWR, Cat. 89184-098) and grid slides (Scientific Device, customer designed) and spun down with 1500×rpm for 5 min. The cytology funnels and grid slides were disassembled. The samples were mounted on the grid slides with mounting medium (Vector Laboratories, H-1000) and coverslips were used to protect the samples. Enumerating and imaging the CTCs was performed on the slides using an Olympus 1×71 inverted fluorescence microscope (Olympus, Tokyo, Japan), using bright field illumination and green and red fluorescence detection. Images were captured with an attached MicroFire® True Color Firewire microscope digital charge-coupled device camera (Optronics, Goleta, Calif., USA). No blue, red or green fluorescence was detected in non-infected and unstained cells.

[0721] To identify and characterize CTCs by cytokeratin immunostaining in the cancer patient blood sample, a second sample of RBC-cleared cells was resuspended in 0.5 mL DMEM-2% FBS and immunostained with a FITC-conjugated cytokeratin (CK) antibodies and Hoechst 33342 dye. The cells were spun with 300×g at 4° C. and resuspended in 4% PFA to fix the samples for 30 minutes. The cells were spun down again and washed with 1×DPBS. The samples were incubated with FITC-conjugated cytokeratin antibody cocktail (anti-CK8-FITC (eBioscience, Cat. 11-9938), anti-CK18-FITC (Sigma, Cat. F4772), anti-CK19-FITC (eBioscience, Cat. 11-9898)) diluted in 10% goat serum for 30 minutes. The samples were washed with 1×DPBS and stained with 200 μL Hoechst solution (5 μg/ml) The stained samples were then washed with 1×DPBS, spun down, resuspended in 1×DPBS. The cells were then processed by cytospin onto grid slides and imaged as described above. Hoechst staining was detected by UV fluorescence, and CK staining by green fluorescence. CK positive cells among approximately 1 million cells were detected in the cytospun sample indicating that CTCs were present in the sample.

[0722] To show that oncolytic viruses, such as vaccinia virus, infect CTCs in the cancer patient blood sample, a third sample of RBC-cleared cells was resuspended in 0.5 mL DMEM-2% FBS containing 1×10⁷ pfu GLV-1h254, which encodes the far-red fluorescent protein TurboFP635 (see Example 17), and incubated at 37° C. in a CO₂ incubator (5% CO₂) overnight. Following infection, the cells were immunostained with a cytokeratin (CK) antibody and Hoechst dye as described above. The cells were then spun down onto slides by cytospin as described above and imaged by phase contrast and fluorescence microscopy. 223 CK positive cells were detected in the cytospun sample, and all 223 CK positive cells also were positive for TurboFP635 signal, indicating that the tumor cells were infected by GLV-1h254. Thus, GLV-1h254 specifically infects CTCs and permits their detection.

B. Detection of CTCs in a Peripheral Blood Sample from a Colorectal Cancer Patient

[0723] Peripheral blood samples were obtained from a human patient with colorectal cancer. 1.5 mL aliquots of the blood sample were lysed for RBCs and the remainder intact cells were pelleted as described in Example 18. The RBC-cleared samples were tested for background staining, cytokeratin staining alone, and vaccinia virus infection with cytokeratin staining as indicated below.

[0724] To test for background autofluorescence, a first sample of RBC-cleared cells was resuspended in 0.5 mL DMEM-2% FBS and incubated at 37° C. in a CO₂ incubator (5% CO₂) overnight. The cells were then spun down onto slides by cytospin as described in Part A. The cells were imaged by phase contrast microscopy and checked for background fluorescence under a microscope as described above. No blue, red or green background fluorescence was detected in the cytospun cells.

[0725] To identify and characterize CTCs by cytokeratin immunostaining in the cancer patient blood sample, a second sample of RBC-cleared cells was resuspended in 0.5 mL DMEM-2% FBS and immunostained with FITC-conjugated anti-cytokeratin (CK) antibodies and Hoechst dye as described in Part A. The cells were then spun down onto slides by cytospin as described above and imaged by phase contrast and fluorescence microscopy. Hoechst staining was detected by UV fluorescence, and CK staining by green fluorescence. CK positive cells were detected in the cytospun sample indicating that CTCs were present in the sample.

[0726] To show that vaccinia virus infects CTCs in the cancer patient blood sample, a third sample of RBC-cleared cells was resuspended in 0.5 mL DMEM-2% FBS containing 1×10⁷ pfu GLV-1h254, which encodes the far-red fluorescent protein TurboFP635 (see Example 17), and incubated at 37° C. in a CO₂ incubator (5% CO₂) overnight. Following infection, the cells were immunostained with FITC-conjugated anti-cytokeratin (CK) antibodies and Hoechst dye as described in Part A. The cells were then spun down onto slides by cytospin as described above and imaged by phase contrast and fluorescence microscopy. 6230 CK positive cells were detected in the cytospun sample, and all 6230 CK positive cells also were positive for TurboFP635 signal, indicating that the tumor cells were infected by GLV-1h254. Thus, GLV-1h254 specifically infects CTCs and permits their detection.

C. Detection of CTCs in a Peripheral Blood Sample from a Breast Cancer Patient

[0727] Peripheral blood samples were obtained from a human breast cancer patient. 2.0 mL aliquots of the blood sample were lysed for RBCs and the remainder intact cells were pelleted as described in Example 18. The RBC-cleared samples were tested for background staining, cytokeratin staining alone, and vaccinia virus infection with cytokeratin staining as indicated below.

[0728] To test for background autofluorescence, a first sample of RBC-cleared cells was resuspended in 0.5 mL DMEM-2% FBS and incubated at 37° C. in a CO₂ incubator (5% CO₂) overnight. The cells were then spun down onto slides by cytospin as described in Part A. The cells were detected by phase contrast microscopy and checked for background fluorescence under a microscope. No blue, red or green background fluorescence was detected in the cytospun cells.

[0729] To identify and characterize CTCs by cytokeratin immunostaining in the cancer patient blood sample, a second sample of RBC-cleared cells was resuspended in 0.5 mL DMEM-2% FBS and immunostained with FITC-conjugated anti-cytokeratin (CK) antibodies and Hoechst dye as described in Part A. The cells were then spun down onto slides by cytospin as described above and imaged by phase contrast and fluorescence microscopy. Hoechst staining was detected by UV fluorescence, and CK staining by green fluorescence. 39 CK positive cells were detected in the cytospun sample indicating that CTCs were present in the sample.

[0730] To show that vaccinia virus infects CTCs in the cancer patient blood sample, a third sample of RBC-cleared cells was resuspended in 0.5 mL DMEM-2% FBS containing 1×10′ pfu GLV-1h254, which encodes the far-red fluorescent protein TurboFP635 (see Example 17), and incubated at 37° C. in a CO₂ incubator (5% CO₂) overnight. Following infection, the cells were immunostained with FITC-conjugated anti-cytokeratin (CK) antibodies and Hoechst dye as described in Part A. The cells were then spun down onto slides by cytospin as described above and imaged by phase contrast and fluorescence microscopy. 137 CK positive cells were detected in the cytospun sample, and 84 of the CK positive cells also were positive for TurboFP635 signal, indicating infection by GLV-1h254. Thus, GLV-1h254 specifically infects CTCs and permits their detection.

D. Detection of CTCs in a Peripheral Blood Sample from a Prostate Cancer Patient

[0731] Peripheral blood samples were obtained from a human prostate cancer patient. 1.65 mL aliquots of the blood sample were lysed for RBCs and the remainder intact cells were pelleted as described in Example 18. The RBC-cleared samples were tested for background staining, cytokeratin staining alone, and vaccinia virus infection with cytokeratin staining as indicated below.

[0732] To test for background autofluorescence, a first sample of RBC-cleared cells was resuspended in 0.5 mL DMEM-2% FBS and incubated at 37° C. in a CO₂ incubator (5% CO₂) overnight. The cells were then spun down onto slides by cytospin as described in Part A. The cells were detected by phase contrast microscopy and checked for background fluorescence under a microscope. No blue, red or green background fluorescence was detected in the cytospun cells.

[0733] To identify and characterize CTCs by cytokeratin immunostaining in the cancer patient blood sample, a second sample of RBC-cleared cells was resuspended in 0.5 mL DMEM-2% FBS and immunostained with FITC-conjugated anti-cytokeratin (CK) antibodies and Hoechst dye as described in Part A. The cells were then spun down onto slides by cytospin as described above and imaged by phase contrast and fluorescence microscopy. Hoechst staining was detected by UV fluorescence, and CK staining by green fluorescence. CK positive cells were detected in the cytospun sample indicating that CTCs were present in the sample.

[0734] To show that vaccinia virus infects CTCs in the cancer patient blood sample, a third sample of RBC-cleared cells was resuspended in 0.5 mL DMEM-2% FBS containing 1×10⁷ pfu GLV-1h254, which encodes the far-red fluorescent protein TurboFP635 (see Example 17), and incubated at 37° C. in a CO₂ incubator (5% CO₂) overnight. Following infection, the cells were immunostained with FITC-conjugated anti-cytokeratin (CK) antibodies and Hoechst dye as described in Part A. The cells were then spun down onto slides by cytospin as described above and imaged by phase contrast and fluorescence microscopy. 844 CK positive cells were detected in the cytospun sample, and all 844 CK positive cells also were positive for TurboFP635 signal, indicating that the tumor cells were infected by GLV-1h254. Thus, GLV-1h254 specifically infects CTCs and permits their detection.

E. Detection of CTCs in a Peripheral Blood Sample from a Metastatic Breast Cancer Patient

[0735] Peripheral blood samples were obtained from a human prostate cancer patient. 1 mL aliquots of the blood sample were lysed for RBCs and the remainder intact cells were pelleted as described in Example 18. The RBC-cleared samples were tested for vaccinia virus infection with cytokeratin and EpCAM staining as indicated below.

[0736] To show that vaccinia virus infects CTCs in the cancer patient blood sample, the sample of RBC-cleared cells was resuspended in 0.5 mL DMEM-2% FBS containing 1×10⁷ pfu GLV-1h254, which encodes the far-red fluorescent protein TurboFP635 (see Example 17), and incubated at 37° C. in a CO₂ incubator (5% CO₂) overnight. Following infection, the cells were immunostained with PE (phycoerythrin)-conjugated anti-pan cytokeratin (CK) antibody (Abcam, Cat. ab52460), a FITC-conjugated EpCAM antibody and Hoechst dye as described in Part A.

[0737] The cells were then spun down onto slides by cytospin as described above and imaged by phase contrast and fluorescence microscopy. CK positive cells were detected in the cytospun sample, and CK positive cells also were positive for EpCAM staining and the TurboFP635 signal, indicating that the tumor cells were CTCs that were infected by GLV-1h254. Thus, GLV-1h254 specifically infects CTCs and permits their detection.

### Example 20

### Examination of General Characteristics of Breast Cancer Cell Lines

### A. Clinical and Pathological Features of Tumors Used to Derive Various Breast Cancer Cell Lines

[0738] Several features of the breast cancer cell lines used in subsequent experiments are set forth in Table 8 below. These features include source, clinical and pathological features of tumor from which the cancer cell lines were derived according to published data (Neve et al. (2006) Cancer Cell 10(6): 515-527). Included in the Table is molecular profiling information, such as the similarity of gene expression (Gene cluster) of the given tumor cell to the luminal (Lu) or basal B (BaB) epithelium, and the expression of estrogen receptor (ER), progesterone receptor (PR), and human epithelial growth factor receptor 2 (HER2), and tumor protein 53 (TP53; also called P53). Square brackets indicate that levels are inferred from mRNA levels alone where protein data is not available. In some cases, mRNA was present, but the protein was undetectable. This is designated by an asterisk (*) in the table below. The mutational status of TP53 (WT, wild-type protein; M, mutant protein) also is listed (obtained from the Wellcome Trust Sanger Institute listing of tumor cell lines; sanger.ac.uk/perl/genetics/CGP/core_line_viewer?action=cell_lines). Also listed are the source of the tumor: XG, xenograft; PE, pleural effusion; PBr, primary breast, the tumor type: AC, adenocarcinoma; IDC, invasive ductal carcinoma; InfDC, inflammatory ductal carcinoma, and the tumorigenicity of the cell lines.

TABLE 8
Features of Breast Cancer Cell Lines

| | Gene | | | | | | Tumor | |
|---|---|---|---|---|---|---|---|---|
| Cell Line | Cluster | ER | PR | HER2 | TP53 | Source | Type | Tumorigenicity |
| GI-101A | Lu | +/−* | − | + | +^{M} | XG | IDC | Y |
| MCF7 | Lu | + | [−] | low | +/−^{WT} | PE | IDC | Y** |
| MDA-MB-231 | BaB | − | [−] | − | ++^{M} | PE | AC | Y |
| Hs 578T | BaB | − | [−] | | +^{M} | PBr | IDC | N |
| SUM149T | BaB | [−] | [−] | | [+] | PBr | InfDC | Y |

Abbreviations: AC, adenocarcinoma; BaB Basal B; IDC, invasive ductal carcinoma; InfDC, inflammatory ductal carcinoma; ER, estrogen receptor; M, mutant protein; PBr, primary breast; PE, pleural effusion; PR, progesterone receptor; PR, progesterone receptor; TP53, tumor protein 53; WT, wild-type protein; XG, xenograft
[ ] levels inferred from mRNA alone
*positive for mRNA and negative for protein
**with estrogen supplement

### B. Side Population Cells in Human Breast Cancer Cell Lines

[0739] In this example, a selection of the human breast cancer cell lines, MCF-7 and GI-101A, were tested for the presence of cancer stem cells using a Hoechst 33342 staining and flow cytometry protocol developed by Goodell et al. (1996) J Exp Med 183:1797-1806. Cancer stem cells have the ability to efflux Hoechst 33342, which is lipophilic DNA binding dye. ATP-binding cassette (ABC) transporters like P-glycoprotein/ABCB1/MDR1 or ABCG2/BCRP, which are preferentially expressed in cancer stem cells, causes the Hoechst dye to efflux mediating a side population phenotype. When excited at a wavelength of 352 nm in a flow cytometer equipped with a UV laser, the Hoechst dye emits in two wavelengths, Hoechst blue (450/20 nm) and Hoechst red (670/40 nm). The cancer stem cells stand out as a distinct and small side population of cells, as compared to the rest of the cells, having low Hoechst emission characteristics, which indicates low levels of the dye within these cells. Distinct regions of the cell population profile also mark different phases of the cell cycle (G0/G1, S, G2/M).

[0740] Cells from mouse bone marrow and the A549 lung cancer cell line served as positive controls for comparing to the breast cancer cell lines. Bone marrow was obtained from femurs of one week old C57BI/6 mice. Cells were detached with Accutase and cultured in DMEM+(supplemented with 2% FBS and 10 mM Hepes).

[0741] Cells were stained with Hoechst 33342 by adding 1 mg/mL Hoechst 33342 to a final concentration of 5 μg/mL and incubated at 37° C. for 90 minutes. After 90 minutes, the cells were collected by centrifugation and resuspended in cold HBSS+ and maintained at 4° C. to inhibit efflux of the Hoechst dye. Subsets of each of the cell samples, bone marrow cells and MCF-7 and GI-101A cell lines, were treated with the calcium channel blocker Verapamil, at a concentration of 50 μM or 100 μM, during Hoechst staining to prevent the nuclei from pumping out the Hoechst dye. For the A549 lung cancer cell line, a subset of cells was treated with 25 μM, 50 μM, 100 μM, or 200 μM Verapamil. Subsets of A549 cells also were treated with 25 μM, 50 μM, 100 μM, or 200 μM of the selective ATP-binding cassette sub-family G member 2 (ABCG 2) inhibitor Fumitremorgin C (FTC) or 12.5 μM, 25 μM, 50 μM, or 200 μM reserpine, which also block the efflux of the Hoechst dye.

[0742] The stained cells were analyzed using a Beckman Coulter Cell Lab Quanta SC flow cytometer equipped with a UV excitation laser and filters enabling the detection of Hoechst blue (450 nm; Hoe450) and Hoechst red (670 nm; Hoe670) emission. Samples were excited at 365 nm and blue fluorescence was collected with 465 bandpass (BP) filter and red fluorescence with a 670 nm edge filter long pass (EFLP) A 550 nm dichroic long pass (DLP) filter was used to separate the emission wavelengths. Hoe450 vs Hoe670 were plotted as the cells were run through the flow cytometer. Side populations were defined as the population of cells that was blocked by the use of Verapamil.

[0743] The one week mouse bone marrow sample yielded a side population that accounted for 4.52±0.2% of the registered events. The side population was confirmed by its reduction to 3.74±0.3% and 1.76±0.1% in the presence of 50 and 100 μM Verapamil, respectively. The A549 lung cancer cell line yielded a similar ratio of side population cells (4.49±0.3%) as the mouse bone marrow, and was reduced to 3.95±0.05%, 3.76±0.01%, 2.56±0.2%, or 1.79±0.04% when treated with 25 μM, 50 μM, 100 μM, or 200 μM Verapamil, respectively, 1.51±0.1%, 0.56±0.08%, 0.51±0.01%, or 0.48±0.06% when treated with 12.5 μM, 25 μM, 50 μM, or 200 μM reserpine, respectively, and 1.31±0.2%, 0.92±0.2%, 0.62±0.1%, or 0.46±0.08% when treated with 25 μM, 50 μM, 100 μM, or 200 μM FTC, respectively. In comparison, the side populations for the MCF-7 and GI-101 cells included 0.77±0.1% and 2.21±0.3% of the total cells, respectively. The gated populations were confirmed to be side population cells by their reduction following Verapamil treatment. For MCF-7 cells, the side population cells reduced to 0.50±0.05% and 0.17±0.08% of the population following 50 and 100 μM Verapamil treatment. Treatment of GI-101A cells with 50 and 100 mM Verapamil reduced the side populations to 0.21±0.05% and 0.17±0.02%, respectively. These results indicate that these human breast cancer cell lines contain very few side population cells, indicating low numbers of cancer stem-like cells.

### Example 21

### Aldehyde Dehydrogenase 1 (ALDH1) Activity in Human Breast Cancer Cell Lines

[0744] Aldehyde dehydrogenase (ALDH1) is a useful marker for isolating primitive stem cell populations including normal human mammary stem and progenitor cells as well as transformed tumor-initiating stem cells. In this example, GI-101A, MCF7, MDA-MB-231, Hs 578T, and SUM139PT breast cancer cell lines were tested for activity of the ALDH1 marker using a commercial assay to detect ALDH1 expression and thereby identify tumor stem cells (the ALDEFLUOR® assay (available from Stemcell™ Technologies, Vancouver BC, CA; see Ginestier et al. (2007) Cell Stem Cell 1(5):555-567)). Cells of each type were harvested, resuspended to a concentration of 1×10⁶ cells/mL in ALDEFLUOR® assay buffer containing ALDH substrate (1 μM per 1×10⁶ cells), with or without 50 mM of the specific ALDH1 inhibitor diethylaminobenzaldehyde (DEAB), according to the manufacturer's instructions (ALDEFLUO® kit, Stem Cell Technologies). The ALDH substrate fluoresces upon cleavage by ALDH.

[0745] Labeled cell suspensions were then analyzed by flow cytometry analysis using Beckman Coulter Cell Lab Quanta SC flow cytometer, using the green fluorescent channel, as detailed by the ALDEFLUOR® assay protocol (Stem Cell Technologies). ALDEFLUOR® assay fluorescence was excited at 488 nm and fluorescence emission was detected using a standard FITC 530/30 band pass filter. The sorting gates were established using propidium iodide stained cells for viability and the ALDEFLUOR® assay-stained cells treated with DEAB as negative controls.

[0746] ALDH1 activity (green fluorescence) vs. event count histograms were generated for cells with (negative control) and without (experimental) DEAB. Histograms from cells exhibiting ALDH1 activity demonstrated fluorescence shifting when comparing the profiles of the cells not treated with DEAB with those of cells that were treated with DEAB. The percent ALDH-positive (ALDH+) cells were calculated for each cell type: 6.43% of GI-101A cells were ALDH+; 0.28% of MCF7 cells were ALDH+; 1.74% of MDA-MB-231 cells were ALDH+; 1.45% Hs 578T cells were ALDH+; and 24.11% of SUM149PT cells were ALDH+.

[0747] To supplement the flow cytometric analysis, the presence of ALDH in GI-101A was assessed visually by fluorescence microscopy. ALDEFLUOR® assay-labeled cells, with or without DEAB, were counterstained with the nuclear dye 4′,6-diamidino-2-phenylindole (DAPI). Phase contrast and fluorescent images of the cells were taken using a fluorescence microscope, equipped with the appropriate filters and a digital camera, using a 100× objective. GI-101A cells exhibited ALDH1 activity in a fraction of the cells as indicated by green fluorescence that was reduced in the presence of ALDH inhibitor (DEAB). Thus, the microscopy results confirm the flow cytometry data.

### Example 22

### Isolation of ALDEFLUOR® Assay-Positive GI-101A Population

[0748] GI-101A cells were selected for further analysis and characterization of the cancer stem cell-like populations. GI-101A cells were sorted by flow cytometry, using a BD FACS Aria III flow cytometer (BD Biosciences), to isolate the subpopulation of ALDEFLUOR-positive (ALDH+) cells detected in Example 21 above. Dot plots were used to set up the parameters to sort the cells. First, intact cells of similar granularity were gated based on their forward scatter (FSC) vs. side scatter (SSC) profiles to select for viability. Next, single cells were gated based on the dot plot of FSC vs. pulse width. Third, to further exclude doublets, cells were gated based on their SSC vs. pulse width profiles. Gated cells that were then positive for green fluorescence were sorted to isolate the ALDH+(about 6% of the parent population) and ALDH−(about 80% of the patent population) cells based on ALDH activity. The sorted populations were then re-analyzed for green fluorescence to assess the purity and recovery of the ALDH+ and ALDH− populations. Due to the instability of the ALDEFLUOR dye in the cells, the fluorescence intensity of the dye decreases dramatically over time, Thus, the sorted ALDH+ cells contained a final recorded percentage of 60-70% ALDH+ cells.

### Example 23

### Tumorigenic Potential of GI-101A ALDEFLUOR-Positive Cells

[0749] GI-101A cells, fractionated into populations of ALDH+ or ALDH− cells as described in Example 22 above, or left unsorted, were examined for relative tumorigenic potential using a mammosphere/tumorsphere formation assay and a nude mouse mammary fat pad xenograft assay.

### A. Mammosphere Formation

[0750] GI-101A cells, from unsorted, ALDH1+ sorted, or ALDH1− sorted populations (see Example 22) were plated in ultra low-attachment 96-well plates in serum-free medium supplemented with growth factors (10 ng/mL EGF and 20 ng/mL bFGF added every 4 days) at a cell density of 1, 10, or 100 viable cells per well. The cells were incubated at 37° C., 5% CO₂ for 12 days to determine the capability of the different GI-101A cell populations to form mammospheres, a property of cancer stem cells (Fillmore and Kuperwasser (2008) Breast Cancer Res. 10(2):R25. Epub 2008 March 26; Charafe-Jauffret et al. (2009) Cancer Res. 69(4):1302-13). Mammosphere formation was assessed under a light microscope and imaged at 100× magnification. The number of mammospheres per 100 cells plated were counted for each group of cells. Mammosphere formation was not observed at the 1 and 10 cell densities. Statistical analysis showed the GI-101A ALDEFLUOR® assay-positive cells had significantly higher (P<0.05) mammosphere formation efficiency at the 100 cell/well density than ALDEFLUOR® assay-negative cells, indicating that the ALDH+ cells have higher tumorigenic potential.

### B. In Vivo Tumor Formation

[0751] Unsorted, ALDH1+ sorted, or ALDH1− sorted GI-101A cells (see Example 22; 5×10², 5×10³, or 5×10⁴ cells) were resuspended in 10 μL serum-free medium, were added to Matrigel and injected into the mammary fat pads of six week old athymic nu/nu female mice. Tumor occurrence and size were monitored weekly, and tumor volume was calculated using external caliper measurement and the modified ellipsoid formula:

Tumor Volume=(length×width×width)/2

[0752] The incidence of tumors per injection site, at 5, 6, 8, and 10 weeks post injection, is set forth in Table 9 below.

TABLE 9
Tumor incidence

| Population | 5 × 10² cells | 5 × 10³ cells | 5 × 10⁴ cells |
|---|---|---|---|
| | Tumors/Injection-Week 5 | | |
| Unsorted | 0/5 | 0/5 | 0/5 |
| ALDH1+ | 0/5 | 0/5 | 3/3 |
| ALDH1− | 0/5 | 0/5 | 0/3 |
| | Tumors/Injection-Week 6 | | |
| Unsorted | 0/5 | 0/5 | 2/5 |
| ALDH1+ | 0/5 | 2/5 | 3/3 |
| ALDH1− | 0/5 | 1/5 | 3/3 |
| | Tumors/Injection-Week 8 | | |
| Unsorted | 0/5 | 1/5 | 5/5 |
| ALDH1+ | 0/5 | 4/5 | 3/3 |
| ALDH1− | 0/5 | 1/5 | 3/3 |
| | Tumors/Injection-Week 10 | | |
| Unsorted | 0/5 | 3/5 | 5/5 |
| ALDH1+ | 0/5 | 5/5 | 3/3 |
| ALDH1− | 0/5 | 5/5 | 3/3 |

[0753] In addition to tumor incidence, the volumes of the tumors were measured over time to show the correlation between ALDH1 positively and tumor growth. Injection sites receiving 5×10² cells, regardless of cell phenotype, did not develop tumors. The fat pads injected with 5×10³ and 5×10⁴ALDH1+ cells generated tumors starting after 5 weeks inoculation and displayed the highest frequency of tumor formation in weeks 6, 8, and 10. The tumor sizes generated from the ALDH1+ cells also were dramatically higher compared to the ALDH1-populations. The size and latency of tumor formation correlated with the number of cells injected. 5×10³ and 5×10⁴ ALDH 1+ cells generated tumors more efficiently than ALDH 1− cells. At the end of the study, the median tumor volume for the GI-101A ALDH1+ tumors was approximately 2300 mm³, while the median tumor volume for the unsorted GI-101A tumors was just over 500 mm³ and the ALDH1− tumors was 200 mm³. These results are consistent with the in vitro mammosphere formation experiment.

[0754] In summary, ALH1+ GI-101A cells generated greater and more rapid tumor incidence than either the unsorted or ALDH1− GI-101A cells. Further, the tumor volumes resulting from the injection of ALDH1+ cells were greater than those from ALDH1− cells. Together, these results indicate that ALDH1+ cells have tumorigenic potential in vivo.

### Example 24

### Parental Cell Line Reconstitution from Sorted Cells

[0755] Cancer stem cells have the ability to self-renew and to differentiate into heterogeneous cell types. In this example, GI-101A cells sorted into populations containing increased (ALDH1+) and reduced (ALDH1−) ALDH1 activity (described in Example 22) or left unsorted, were passaged three times to determine if these cells could reconstitute the parental cell line over time. For each passage, each cell culture was expanded in vitro for 12 days. The ALDH1+ activity was measured by flow cytometry as described in Example 21 for each phenotype and compared to unsorted cells which were grown in parallel at each passage. The fraction of ALDH+ cells over time is set forth in Table 10 below for each condition.

TABLE 10
Percent ALDH+ cells

| Passage Number | Unsorted | ALDH+ | ALDH− |
|---|---|---|---|
| P0 | n/a | 64.2% | n/a |
| P1 | 2.52% | 12.6% | 2.12% |
| P2 | 6.41% | 6.36% | 7.08% |
| P3 | 7.14% | 7.08% | 7.74% |

[0756] At the time of sorting, P0, the ALDH+ population contained 64.2% ALDH1+ cells. The percentage of ALDH1+ cells progressively declined over passaging. By P3, the ALDH+ sorted sample contained only 7.08% ALDH+ cells, similar to the unsorted sample which contained 7.14% ALDH+ cells. The ALDH− sorted cell line increased expression of ALDH+ cells from 2.12% ALDH+ cells at P1 to 7.74% ALDH+ cells at P3.

### Example 25

### ALDH+ Cell Chemoresistance and Resistance to Ionizing Radiation

[0757] Cancer initiating cells in primary human leukemia and glioblastoma are resistant to chemotherapy. In this example, unsorted, ALDH1+ sorted, or ALDH1− sorted GI-101A cells (see Example 22) were examined for resistance to chemotherapeutic agents and ionizing radiation.

### A. Resistance to Chemotherapeutic Agents

[0758] The effects of 5-fluorouracil (5-FU), carboplatin, cisplatin, mitomycin C and salinomycin on cell viability of unsorted, ALDH+ sorted and ALDH− sorted GI-101A cells was examined. 1×10⁴ cells were plated in 96-well plates in 200 μL media per well and incubated for overnight at 37° C. in a 5% CO₂ incubator. The medium was replaced with 200 μL fresh medium containing varying doses of each chemotherapeutic agent (see Table 11 for concentrations tested for each agent) or medium alone. The cells were then incubated for 4 days at 37° C. in a 5% CO₂ incubator.

[0759] After incubation with the chemotherapeutic agent, the medium was aspirated and replaced with medium contain 20 to 50 μL of MTT solution for a total volume of 200 The cultures were incubated 4-6 hours at 37° C. in a 5% CO₂ incubator. The MTT solution was then removed and 200 μl stop solution was added to each well and gently mixed to dissolve the formazan crystals. The plate was then read on a microtiter plate reader at 550 to 570 nm absorbance. Absorbance in wells containing the chemotherapeutic agent were compared to untreated control cells.

[0760] Results were measured as the percentage of surviving cells compared to the control untreated cells. All samples were analyzed in triplicate. Table 11 represents cell viability at 4 days post treatment with the chemotherapeutic agent. Increasing doses of the chemotherapeutic agents generally decreased the percentage of viable cells in the sample. For all treatments tested, the ALDH+ sorted cells were more resistant to cell killing than the ALDH− sorted cells. For the 5-fluorouracil (5-FU), carboplatin, mitomycin C and salinomycin treatment, the ALDH+ sorted cells also were more resistant than the unsorted cells.

TABLE 11
Cell Viability (%) Following 4-Day Treatment with
Chemotherapeutic Agents

| | 5-FU | | | | |
|---|---|---|---|---|---|
| Population | 0.1 μM | 1 μM | 10 μM | 100 μM | 1 mM |
| Unsorted | 126 | 67 | 111 | 55 | 5 |
| ALDH1+ | 95 | 90 | 100 | 75 | 5 |
| ALDH1− | 60 | 37 | 62 | 35 | 5 |

| | Carboplatin | | | |
|---|---|---|---|---|
| Population | 0.1 μM | 1 μM | 10 μM | 100 μM |
| Unsorted | 92 | 90 | 93 | 7 |
| ALDH1+ | 113 | 121 | 99 | 3 |
| ALDH1− | 64 | 100 | 64 | 2 |

| | Cisplatin | | | | |
|---|---|---|---|---|---|
| Population | 0.1 μM | 1 μM | 10 μM | 100 μM | 1 mM |
| Unsorted | 78 | 95 | 106 | 66 | 0 |
| ALDH1+ | 73 | 65 | 65 | 44 | 0 |
| ALDH1− | 58 | 57 | 51 | 14 | 0 |
| | Mitomycin C | | | | |
| Population | 0.01 μM | 0.1 μM | 1 μM | 10 μM | 100 μM |
| Unsorted | 92 | 91 | 20 | 0 | 0 |
| ALDH1+ | 110 | 111 | 31 | 0 | 0 |
| ALDH1− | 78 | 69 | 17 | 0 | 0 |

| | Salinomycin | | | |
|---|---|---|---|---|
| Population | 0.01 μM | 0.1 μM | 1 μM | 10 μM |
| Unsorted | 36 | 41 | 66 | 0 |
| ALDH1+ | 54 | 55 | 66 | 0 |
| ALDH1− | 23 | 18 | 42 | 0 |

### B. Resistance to Ionizing Radiation

[0761] The effect of radiation on cell viability of unsorted, ALDH+ sorted and ALDH-sorted GI-101A cells was examined using an ionizing radiation clonogenic assay. Cells were plated in 35 mm culture dishes, one dish for each ionizing radiation dose. The cells were irradiated at a dosage of 0.5, 1, 2, or 4 Gy as a single fraction using a RS2000 X-ray biological irradiator (Rad Source Technologies Inc.) or received no radiation. The cells were harvested following treatment and counted using a Coulter counter and re-plated at varying densities from 100-10,000 cells per test dish in duplicate. The cells were then incubated at 37° C. in a 5% CO₂ incubator until the control dished formed sufficiently large clones. The medium was then removed and the cells were gently washed with DPBS. 2-3 mL of a 6% glutaraldehyde and 0.5% crystal violet mixture was added to the cell and incubated for 30 minutes. The staining mixture was then removed and the cells were washed with tap water and dried in normal air at room temperature. The colonies were counted, and plating efficiency (PE) and surviving fraction (SF) was calculated according to the following formulae:

Plating Efficiency(PE)=[(No. Colonies Formed)/(No. of cells seeded)]×100%

Surviving Fraction(SF)=[(No. Colonies Formed After Treatment)/(No. of cells seeded)×PE]×100%

[0762] To generate the radiation survival curve, the surviving fraction at each radiation dose was normalized to that of the non-irradiated control and curves were fitted using a linear quadratic model (surviving fraction=e^{(-α dose-β dose 2)}, in which α is the number of logs of cells killed per Gy from the linear portion of the survival curve and β is the number of logs of cells killed per [Gy]² from the quadratic component).

[0763] At all four radiation dosages tested, the ALDH+ cell population exhibited higher resistance to cell killing by radiation compared to the ALDH− and unsorted cell populations. At the 4 Gy radiation dosage, the resistance of the ALDH+ cells was significantly higher (p<0.05) than the ALDH− and unsorted cells.

### Example 26

[0764] ALDH+ Cell Invasiveness

[0765] ALDEFLUOR positive breast cancer cells have been reported to have cell invasion ability in vitro, which correlate with their ability to metastasize (Charafe-Jauffret et al (2009) Cancer Res. 69(4):1302-13; Crocker et al (2009) J Cell Mol Med 13(8B):2236-52. In this example, unsorted, ALDH1+ sorted, or ALDH1− sorted GI-101A cells (see Example 22) were examined for cell invasive ability using a CULTREX 96-well Basement Membrane Extract (BME) cell invasion assay kit (Trevigen). Cells were cultured to about 80% confluence. 50,000 cells were required for each assay well. The membrane of the top invasion chamber was coated with 50 μL of 0.1× to 1×BME solution (three chambers were left uncoated for controls) and incubated for 4 hours or overnight at 37° C. in a 5% CO₂ incubator. The cells were harvested, and centrifuged at 250×g for 10 minutes. The supernatant was removed and the cells were washed with 1× wash buffer. The cells were resuspended at a concentration of 1×10⁶ cells/mL of serum free medium. The BME solution was aspirated from the top chambers and 50 μL of cells were added to the top chambers. 150 μL of medium per well was added to the bottom chambers, with or without chemoattractants (10% FBS). The chambers were incubation at 37° C. in a 5% CO₂ incubator for 24 hours. Following incubation media from the top well was aspirated and the top chamber was washed with 100 μL wash buffer. Then the bottom chamber was aspirated and washed twice with 200 μL wash buffer. The top chambers were transferred to the assay chamber plate. 12 μL of Calcein-AM stock solution was added to 10 mL of Cell Dissociation Solution and 150 μL of the mixture was added to the bottom chamber of the assay chamber plate. The cell invasion device was assembled and incubated at 37° C. in a 5% CO₂ incubator for 1 hour. Then the top chamber was removed and the plate was read at 485 nm excitation, 520 emission.

[0766] A standard curve was generated by plotting the corrected relative fluorescence units (RFU) on the y-axis against the cell number on the x-axis and inserting the trend line (best fit) equation and R-squared value. The trend line equation was used to determine the number of cells present in each sample well. A standard curve was generated for each cell type. The number of cells was compared for each condition to evaluate relative invasion and the number of invaded cells was divided by the number of starting cells (e.g. 50,000) to determine the percent invasion.

[0767] Table 12 presents data for the percentage of cell invasion for each cell population in the presence or absence of the FBS chemoattractant. As shown in the table, the ALDH1+ cells were more invasive than the ALDH− and the unsorted cell populations.

TABLE 12
Percentage Cell Invasion by unsorted, ALDH+ sorted
and ALDH− sorted cells

| Cell Population | +10% FBS | −10% FBS |
|---|---|---|
| Unsorted | 1.8% | 0.8% |
| ALDH1+ | 2.1% | 0.75% |
| ALDH1− | 1.3% | 0.1% |

### Example 27

### CD44 and CD49f Expression in ALDH+ Cell Populations

[0768] In breast tumor, a CD44+/CD24^{-/low}/ESA⁺/Lineage⁻ subpopulation was originally identified as the tumorigenic fraction based on the enhanced ability of these cells to form tumors in non-obese diabetic/severe combined immunodeficiency (NOD/SCID) mice when injected at a very low number (Al-Hajj et al. (2003) Proc. Natl. Acad. Sci. USA 100(7):3983-3988). Human breast cancer cell lines contain CD44+/CD24^{-/low}/ESA⁺ cells that have stem cell properties including anchorage-independent growth at clonal densities (self-renewal) and the ability to reconstruct the parental cell fractions, along with in vivo tumorigenicity (Ponti et al. (2005) Cancer Res 65(13):5506-5511; Fillmore et al. (2008) Breast Cancer Res 10(2):R25). CD44+/CD24^{-/low} phenotype also is correlated with the enhanced expression of pro-invasive genes and the ability to form distant metastasis (Abraham et al. (2005) Clin Cancer Res. 11(3):1154-1159; Balic et al. (2006) Clin Cancer Res. 12(19):5615-5621; Sheridan et al. (2006) Cancer Res 8(5):R59). In addition, tumorigenicity of prospective breast CSCs has been linked to the expression of α6 integrin (CD49f) (Cariati et al. (2008) Int J Cancer 122(2):298-304 and β1 integrin (Crowe (2004) BMC Cancer 4:18).

[0769] In this example, ALDH1+ sorted, or ALDH1− sorted GI-101A cells (see Example 22) were examined for expression of CD44, CD24 and CD49f by flow cytometry analysis. First an ALDEFLUOR assay was performed on GI-101 cells in the presence or absence of DEAB inhibitor as described in Example 21. The ALDEFLUOR stained cells were then subjected to staining with CD44, CD24 and CD49f antibodies. The ALDEFLUOR stained cells were centrifuged for 10 minutes at 300×g at 4° C. and resuspended to a concentration of 2×10⁷ cells per mL in cold staining buffer. 50 μL it of cells were added to 12×75 round bottoms tubes on ice for each stain. 10 μL diluted antibody mixture was added and incubated for 30-45 minutes in an ice bath to minimize release of the Hoechst dye. One set of ALDEFLUOR stained cells was stained with allophycocyanin (APC)-conjugated mouse anti-human CD44 (BD Biosciences) and R-phycoerythrin (PE)-conjugated mouse anti-human CD24 (BD Biosciences). Another set of ALDEFLUOR stained cells was stained with allophycocyanin (APC)-conjugated mouse anti-human CD44 (BD Biosciences; APC has an excitation/emission maxima of 650 nm/660 nm) and R-phycoerythrin (PE)-conjugated mouse anti-human CD49f (BD Biosciences; PE has an excitation/emission maxima of 496 nm/578 nm). The cells were washed twice with 2 mL staining buffer at 4° C. The cells were resuspended in 400 μL it staining buffer and kept on ice until analyzed by flow cytometry.

[0770] ALDEFLUOR-positive (ALDH1+) and ALDEFLUOR-negative (ALDH1−) cells were sorted as described in Example 22 (FITC excitation/emission maxima 494 nm/520 nm). The percentage ALDEFLUOR-positive and ALDEFLUOR-negative cells for each set of staining is shown in Tables 13a and 13c. Flow cytometry was performed to analyze the expression of CD44/CD24 expression and CD44/CD49f expression in ALDEFLUOR-positive versus ALDEFLUOR-negative cells. The percentage of CD44⁺ in ALDEFLUOR-positive cells reached to 97.89% (Table 13b; 0.79%+97.1%) or 94.99% (Table 13d; 0.79%+94.2%). The percentage of CD44⁺ in ALDEFLUOR-negative cells dropped to 85.23% (Table 13b; 2.53%+82.7%) or 81.83% (Table 13d; 4.83%+77.0%). Similarly, the percentage of CD49f⁺ in ALDEFLUOR-positive cells reached 99.09% (Table 13d; 94.2%+4.89%) and the percentage of CD49r in ALDEFLUOR-negative cells dropped to 90.8% (Table 13d; 77.0%+13.8%). There was no significant difference of the CD24⁺ expression between ALDEFLUOR-positive cells (98.92%, Table 13b; 97.1%+1.82%) and ALDEFLUOR-negative cells (96.3%, Table 13b; 82.7%+13.6%). In combination, the percentage of CD44⁺/CD24⁻ in ALDEFLUOR-positive cells (0.79%, Table 13b) was unexpectedly lower than that in ALDEFLUOR-negative cells (2.53%, Table 13b). And the percentage of CD44⁺/CD49f⁺ in ALDEFLUOR-positive cells (94.2%, Table 13d) was higher than that in ALDEFLUOR-negative cells (77.0%, Table 13d).

TABLE 13a

| | ALDH+ | ALDH− |
|---|---|---|
| +DEAB | 0.09% | 99.9% |
| −DEAB | 7.59% | 92.4% |

TABLE 13b

| | CD44⁺/CD24⁻ | CD44⁺/CD24⁺ | CD44⁻/CD24⁺ | CD44⁻/CD24⁻ |
|---|---|---|---|---|
| ALDH+ | 0.79% | 97.1% | 1.82% | 0.25% |
| ALDH− | 2.53% | 82.7% | 13.6% | 1.24% |

TABLE 13c

| | ALDH+ | ALDH− |
|---|---|---|
| +DEAB | 0.09% | 99.9% |
| −DEAB | 8.37% | 91.6% |

TABLE 13d

| | CD44⁺/CD49f | CD44⁺/CD49f⁺ | CD44⁻/CD49f⁺ | CD44⁻/CD49f |
|---|---|---|---|---|
| ALDH+ | 0.79% | 94.2% | 4.89% | 0.12% |
| ALDH− | 4.83% | 77.0% | 13.8% | 4.35% |

### Example 28

### Replication of Vaccinia Virus in ALDH+Cell Populations

[0771] In this example, the ability of the vaccinia virus GLV-1h68 to replicated in unsorted, ALDH1+ sorted, or ALDH1− sorted GI-101A cells (Example 22) was shown.

[0772] Unsorted, ALDH1+ sorted, or ALDH1− sorted GI-101A cells were plated in 6-well plates and incubated overnight at 37° C. in a 5% CO₂ incubator. GLV-1h68 virus (SEQ ID NO: 1; U.S. Pat. Pub. No. US2005/0031643) was added at a multiplicity of infection (MOI) of 0.01 or 10 in triplicate and incubated at 37° C. in a 5% CO₂ incubator for 1 hour with gentle agitation every 20 minutes. After incubation, the virus solution was aspirated and fresh medium was added. The infected cells were harvested at 1, 18, 24, 48 and 72 hours post infection and viral titer was measured using CV-1 cells by standard plaque assay.

[0773] GLV-1h68 exhibited a higher replication rate in the ALDH+ cells compared to the unsorted and ALDH− cell populations at the lower MOI of 0.01 and higher MOI of 10. Viral titer at 72 hours post infection of ALDH+ cells at a MOI of 0.01 was approximately 3 times greater than that of the unsorted and ALDH− cells and approximately 2 times greater at a MOI 10. Thus, GLV-1h68 replicated more efficiently in the ALDH+ GI-101A cells

### Example 29

### Effect of Vaccinia Virus on Growth ALDH+ Xenograft Tumors

[0774] In this example, the effects of GLV-1h68 on tumor growth in a mouse xenograft tumor model generated from implantation of unsorted, ALDH1+ sorted, or ALDH1− sorted GI-101A cells are shown.

[0775] Xenograft tumors were developed in 6-week-old female nude mice by implanting 50,000 or 5,000 cells (unsorted, ALDH1+ sorted, or ALDH1− sorted GI-101A cells (see Example 22)) mammary fat pad as described in Example 23. For comparison, each mouse was implanted with two different fraction of cells, one in each of the left and right mammary fat pad. For example, one mouse received 50,000 ALDH1+ cells in the right fat pad and 50,000 ALDH1− cells in the left fat pad. In another example, one mouse received 5,000 ALDH1+ cells in the right fat pad and 50,000 ALDH1+ cells in the left fat pad.

[0776] At 12 weeks post tumor cell implantation, the mice were injected with a single dose of 5×10⁶ pfu of GLV-1h68 in 100 μL phosphate-buffered saline (PBS) or 100 μL PBS only, delivered retro-orbitally. Analysis of tumor size by caliper measurement was performed weekly at 0, 7, 14, 28, 35, 42, and 49 days post virus infection (dpi). Tumor-bearing mice treated with GLV-1h68 also were visualized by fluorescence whole body imaging.

[0777] Tumor growth was significantly inhibited after the virus treatment. In the 5,000 cells/injection group, tumors derived from ALDH1+ cells showed dramatic response upon virus treatment compared to tumors derived from ALDH1− or unsorted cells. In mice bearing ALDH+ (right side) and ALDH− (left side) GI-101A tumors, the GFP signal was stronger in the ALDH+ tumor compared to the ALDH− tumor, indicating that the GLV-1h68 virus primarily infected the ALDH+ tumor. Thus, increased vaccinia virus replication correlated with greater tumor regression in the ALDH+ tumor. In mice bearing tumors generated from 50,000 unsorted GI-101A cells (left flank) and 5,000 unsorted GI-101A cells (right flank), the GFP signal was stronger in the tumor generated from larger number of unsorted GI-101A cells.

### Example 30

### Effect of Epithelial-Mesenchymal Transition (EMT) on Expression Cell Adhesion and Cell Surface Markers in Human Mammary Epithelial Cells

[0778] Epithelial-mesenchymal transition (EMT) is a process by which cells lose cell adhesion mediated by repression of the cell adhesion molecule E-cadherin and exhibit an increase in cell mobility. EMT is characteristic of cells undergoing proliferation and is involved in the initiation of metastasis. In this example, EMT was induced in mammary epithelia cells or GI-101A cells by transforming growth factor β (TGF-β) and/or other growth factors. Cell morphology and expression of cell adhesion and surface markers over time was observed using immunostaining and fluorescence microscopy and cell sorting. For this experiment, expression of E-cadherin, vimentin, fibronectin were detected by fluorescence microscopy to confirm EMT transition. CD44 and CD24 expression were analyzed by fluorescence activated cell sorting (FACS).

### A. EMT Induction in Human Mammary Epithelial Cells (HMLE)

[0779] Human mammary epithelial cells (HMLE; Dr. Robert A. Weinberg) were plated at a density of about 50% in DMEM/F-12 medium and incubated overnight at 37° C. in a CO₂ incubator. The cells were then cultured in inducing medium (DMEM/F-12 (1:1) medium supplemented with insulin, hydrocortisone, 5% FBS, and 2.5 ng/mL TGF-β1) to induce EMT or non-inducing medium (i.e. without TGF-β1). The inducing medium or non-inducing medium was refreshed every 3 days for 12 days. Following EMT treatment, one set of cells were immunostained for E-cadherin, vimentin and fibronectin expression, three widely used EMT markers. Another set of cells was harvested, stained for CD44 and CD24 expression and analyzed by flow cytometry as described in Example 27.

[0780] For immunostaining of E-cadherin, vimentin and fibronectin, cells were fixed and permeabilized on the culture plates and incubated with FITC-conjugated antibodies against E-cadherin, vimentin and fibronectin using a standard cell staining protocol. Following removal of unbound antibody, the cells were counterstained with the nuclear dye 4′,6-diamidino-2-phenylindole (DAPI). After staining, phase contrast and fluorescent images of the cells were taken using a fluorescence microscope, equipped with the appropriate filters and a digital camera, using a 100× objective.

[0781] After 12 days, there was significant change of HMLE cells' morphology in the absence or presence of TGF-β1 as observed by phase contrast microscopy. Epithelial and mesenchymal cells have historically been identified on the basis of their unique visual appearance and the morphology of the multicellular structures they create (Shook et al. (2003) Mech. Dev. 120(11):1351-83). The TGF-β1-induced HMLE cells exhibited typical mesenchymal characteristics which are in spindle and irregular shape with migratory protrusions compared to non-induced controls which displayed regularly spaced cell-cell junctions.

[0782] Prior to treatment, moderate E-cadherin and low levels of vimentin and fibronectin were detected. At 12 days post-EMT induction, E-cadherin expression was down-regulated in TGF-β1-induced HMLE cells compared to non-induced cells, vimentin expression was up-regulated in induced cells compared to non-induced cells, and fibronectin expression was up-regulated in induced cells compared to non-induced cells.

[0783] The flow cytometry analysis showed that prior to TGF-β treatment, most of the cell population in the HMLE sample exhibited the CD44⁻/CD24⁻ phenotype, and the amount of CD44⁺/CD24^{-/low} cells was only 1.1±0.4%. After 12 days EMT induction in the presence of TGF-β1, a large enrichment of CD44⁺/CD24^{-/low} cells was observed (51.9%±3%). The percentage of CD44⁺/CD24^{-/low} cells of the non-induced HMLE cells did not significantly change compared to initial cells: only 3.2±0.8% of the cells were CD44⁺/CD2^{-/low} in the non-induced culture after 12 days, and some enrichment of CD44⁻/CD24⁺ was observed.

### B. EMT Induction in GI-101A Cells

[0784] In this experiment, combinations of growth factors were assessed for their ability to induce EMT transition in GI-101A cells. GI-101 cells were plated as in Part A and exposed to various combinations of EGF, bFGF and TGF-β1 in the induction medium: TGF-β1 only, EGF+TGF-β1, EGF+bFGF, and EGF+bFGF+TGF-β1. For this experiment, 2.5 ng/mL TGF-β1, 1 ng/mL of EGF, and/or 10 ng/mL of bFGF was added to the induction medium. Following induction of EMT, the cells were immunostained for E-cadherin, vimentin and fibronectin expression on the plate or analyzed for CD44 and CD24 expression by flow cytometry as described in Part A.

[0785] After 12 days of EMT induction, the morphology of cells in the presence of growth factors changed significantly compared to the control. According to the morphology, the growth factor combination of EGF+bFGF+TGF-β1 induced EMT more efficiently than other combinations. Flow cytometry analysis of CD44/CD24 expression showed that GI-101A cell induced by the combination of EGF+bFGF+TGF-β1 exhibited the highest percentage of CD44⁺/CD24^{-/low} cells (10.32%) compared to uninduced cells (1.29%). The percentage of CD44⁺/CD24^{-/low} cells in samples that were treated with other combinations of growth factors also was higher than in non-induced cells (e.g., TGF-β1 only (3.13% CD44⁺/CD24^{-/low} cells), EGF+TGF-β1 (8.36% CD44⁺/CD24^{-/low} cells), and EGF+bFGF (8.75% CD44⁺/CD24^{-/low} cells).

[0786] Immunostaining of EMT markers also confirmed EMT transition in the induced cells. E-cadherin expression was down-regulated in EGF+bFGF+TGF-β1-induced GI-101A cells compared to non-induced cells; the vimentin expression was up-regulated in induced cells compared to non-induced cells; and the fibronectin expression was up-regulated in induced cells compared to non-induced cells.

### Example 31

### Chemoresistance of EMT Induced GI-101A Cells

[0787] Cancer stem cells (CSCs) are resistant to many current cancer treatments, including chemo- and radiation therapy (Dean et al. (2005) Nat Rev Cancer 5(4): 275-284; Bao et al. (2006) Nature 444(7120): 756-60; Woodward et al. (2007) Proc Natl Acad Sci USA 104(2):618-623; Eyler et al. (2008) J Clin Oncol 26(17): 2839-2845; Li et al. (2008) J Natl Cancer Inst 100(9): 672-679; Diehn et al. (2009) Nature 458(7239): 780-783). This indicates that many cancer therapies, while killing the bulk of tumor cells, may ultimately fail because they do not eliminate CSCs, which survive to regenerate new tumors. The induction of an epithelial-mesenchymal transition (EMT) in normal or neoplastic mammary epithelial cell populations has been shown to result in the enrichment of cells with stem-like properties (Mani et al. (2008) Cell 133(4): 704-715).

[0788] To determine whether EMT-induced breast cancer cells were enriched in cancer stem-like cells that display chemo-resistant ability, cells induced with various combinations of growth factors were treated with different doses breast cancer chemotherapeutic drugs: 5-FU: 10⁻⁶ mol/L, 10⁻⁵ mol/L, 104 mol/L, 10⁻³ mol/L; Carboplatin: 10⁻⁷ mol/L, 10⁻⁶ mol/L, 10⁻⁵ mol/L, 10⁻⁴ mol/L; Etoposide: 10⁻⁶ mol/L, 10⁻⁵ mol/L, 10⁻⁴ mol/L, 10⁻³ mol/L; Mitomycin-C: 10⁻⁷ mol/L, 10⁻⁶ mol/L, 10⁻⁵ mol/L, 10⁻⁴ mol/L; and Salinomycin: 10⁻⁷ mol/L, 10⁻⁶ mol/L, 10⁻⁵ mol/L, 10⁻⁴ mol/L. Resistance to cytotoxic agents was measured by incubation with or without the cytotoxic agent followed by assessment of cell viability with an MTT assay as described in Example 25.

[0789] Briefly, 1×10⁴ GI-101A cells (induced with EGF, bFGF, and/or TGF-β1 or non-induced as described in Example 30) were plated in 96-well plates in 200 μL, media (inducing or non-inducing media) per well and incubated for overnight at 37° C. in a 5% CO₂ incubator. The medium was replaced with 200 μL fresh medium (inducing or non-inducing media) containing varying doses of each chemotherapeutic agent or medium alone. The cells were then incubated for 4 days at 37° C. in a 5% CO₂ incubator. After incubation with the chemotherapeutic agent, the medium was aspirated and replaced with medium contain 20 to 50 μL of MTT solution for a total volume of 200 μL. The cultures were incubated 4-6 hours at 37° C. in a 5% CO₂ incubator. The MTT solution was then removed and 200 tit stop solution was added to each well and gently mixed to dissolve the formazan crystals. The plate was then read on a microtiter plate reader at 550 to 570 nm absorbance. Absorbance in wells containing the chemotherapeutic agent were compared to untreated control cells. Results were measured as the percentage of surviving cells compared to the control untreated cells. All samples were analyzed in triplicate.

[0790] As expected for chemo-resistance of cancer stem-like cells which are enriched in EMT induced GI-101A cells, the growth factor combinations of EGF+bFGF+TGF-β1- and EGF+bFGF-induced GI-101A cells showed significant survival ability compared to other growth factor combination-induced or non-induced cells. EMT cells did not exhibit chemo-resistant ability upon the treatment of Salinomycin, an inhibitor of cancer stem cells (Gupta et al. (2009) Cell 138(4): 645-659).

### Example 32

### EMT Induction of GI-101A Cell Invasion and Migration

[0791] As described in Example 30, EMT-induced GI-101A cells exhibited changes in morphology indicative of increased cell motility and migratory capacity. The invasive and migrating ability of EMT-induced cells was examined using a CULTREX 96-well Basement Membrane Extract (BME) cell invasion assay kit (Trevigen). For the assay, GI-101A cells were induced with various combinations of growth factors as indicated in Table 14 for 6 days as described in Example 30, then plated in invasion chambers. The invasion assay was conducted as described in Example 26.

[0792] Cells which were undergoing EMT migrated through BME more efficiently than the control cells. As a chemoattractant, 10% Fetal Bovine Serum (FBS) showed less effect on invasion and migration of EMT cells.

TABLE 14
Percentage Cell Invasion by EMT-induced Cells

| Cell Population | +10% FBS | −10% FBS |
|---|---|---|
| Mock | 1.1% | 0.8% |
| TGF-β1 | 3.6% | 3.3% |
| EGF + TGF-β1 | 4.5% | 4.1% |
| EGF + bFGF + TGF-β1 | 3.7% | 3.4% |
| EGF + bFGF | 4.3% | 3.8% |

### Example 33

### Vaccinia Virus Replication in EMT-Induced Cells

[0793] In this experiment the ability of vaccinia virus to replicate in EMT-induced cells was examined. GLV-1h68, which encodes GFP, and GLV-1h190, which encodes TurboFP635 (far-red fluorescence “Katushka”) were used to infect HMLE or GI-101A cells undergoing EMT.

[0794] HMLE or GI-101A cells were plated in 6-wells plates and incubated overnight at 37° C. in a 5% CO₂ incubator. The cells were then induced in inducing medium containing 2.5 ng/mL TGF-β1 for 12 days as described in Example 30. At 12 days post EMT induction, GLV-1h68 or GLV-1h190 virus was added to the cells at an MOI of 10. GLV-1h68 was used to infect the GI-101A cells and GLV-1h190 was used to infect the HMLE cells. Cell morphology and GFP and far-red fluorescence was monitored at 6, 8, 10 and 12 hours post infection by phase contrast and fluorescence microscopy with the appropriate filters. Images were taken at the same position of the plates every 2 hours at 100× magnification.

[0795] After 12 hours post infection of the HMLE cells with GLV-1h190, there were only few HMLE cells of the non-induced culture that expressed TurboFP635 protein as detected by red fluorescence. In contrast, in the TGF-β1-induced cell culture, all mesenchymal type cells expressed the TurboFP635 protein and only few epithelial type cells expressed the far-red fluorescent protein. As confirmed by phase contrast microscopy, there was a sharp contrast between the morphology of the mesenchymal versus epithelial type cells, and GLV-1h190 preferentially infected the EMT induced cells.

[0796] At 6 hours to 12 hours post infection of GI-101A with GLV-1h68, the mesenchymal type GI-101A cells expressed GFP earlier and more efficiently compared to epithelia type cells. The cell types were distinguished by phase contrast microscopy. The cytopathogenic effect (CPE) in mesenchymal type cells also was more significant than in epithelia type cells.

[0797] These results indicate that the vaccinia virus preferentially replicated in EMT induced cells from normal tissue and tumor cell lines.

### Example 34

### Isolation of a CD44⁺/CD24⁻ ESA⁺ Population from EMT-Induced GI-101A Cells

[0798] The intracellular marker profile CD44⁺/CD24⁻/ESA⁺ has been widely used in identification and isolation of human breast cancer stem cell in patient samples, including primary tumors, or cancer cell lines (ESA=epithelial specific antigen, also called EpCAM herein; Al-Hajj et al. (2003) Proc Natl Acad Sci USA 100(7): 3983-3988; Sheridan et al. (2006) Breast Cancer Res 8(5): R59; Fillmore (2008) Breast Cancer Res 10(2): R25; Meyer et al. (2009) Breast Cancer Res 11(6): R82; Ginestier et al. (2007) Cell Stem Cell 1(5): 555-567; Wright et al. (2008) Breast Cancer Res 10(1): R10; Mine et al. (2009) Cancer Immunol Immunother 58(8):1185-1194, Epub Dec. 2, 2008).

[0799] CD44⁺/CD24⁻ cells can be enriched by inducing EMT from normal mammary epithelia cells or cancer cell lines, as described in Example 30 and in the art (Mani et al. (2008) Cell 133(4): 704-715; Morel et al. (2008) PLoS One 3(8): e2888; Gupta et al. (2009) Nat Med 15(9): 1010-1012). In this example, CSC populations were isolated from EMT-induced GI-101A cells for further study. CD44⁺/CD24⁻/ESA⁺, CD44⁺/CD24^{mid}/ESA⁺ CD44⁺/CD24⁺/ESA⁺, and CD44⁻/CD24^{all}/ESA⁺ cell populations were isolated and examined.

[0800] GI-101A cells were induced to EMT by combination treatment with three growth factors, EGF (5 ng/mL), bFGF (10 ng/mL) and TGF-β1 (2.5 ng/mL) for 12 days as described in Example 30. Then the cells were stained with stained with allophycocyanin (APC)-conjugated mouse anti-human CD44 (BD Biosciences), R-phycoerythrin (PE)-conjugated mouse anti-human CD24 (BD Biosciences), and FITC-conjugated mouse anti-human EpCAM-1/ESA and sorted by using BDFACS Aria III cells sorter. The cells were first electronically gated to exclude dead cells, aggregates and doublets. Cells were first selected for viability (P1) and then for single cells (P2 and P3) based on forward and side scatter plots. Then the CD44/CD24 and ESA antigens were analyzed and selected based on CD44, CD24 and ESA signal intensity. Table 15 shows the relative percentages of the subpopulations for CD44 and CD24 expression. ESA expression in EMT induced GI-101A cells was similar to non-induced cells (98.9% compared to 97.2%). To better study the different fractions of EMT induced cells, the cells were gated into the following four groups for induced and non-induced cells: CD44⁺/CD24⁻/ESA⁺, CD44⁺/CD24^{mid}/ESA⁺, CD44⁺/CD24⁺/ESA⁺, and CD44⁻/CD24^{all}/ESA⁺.

TABLE 15
Percentage Cell Populations for CD44 and CD24
expression in Induced versus Non-induced Cells

| Cell Population | Induced | Non-Induced |
|---|---|---|
| CD44⁺/CD24⁻ | 12.6% | 9.45% |
| CD44⁺/CD24^{mid} | 46.7% | 50.9% |
| CD44⁺/CD24⁺ | 8.54% | 9.45% |
| CD44⁻/CD24^{all} | 12.1% | 12.0% |

### Example 35

### Tumorigenic Potential of EMT-Induced Cell Populations In Vivo

[0801] In this Example, the different cells populations isolated in Example 34 were examined for tumorigenic potential in a mouse xenograft model. 10,000 purified CD44⁺/CD24⁻/ESA⁺, CD44⁺/CD24^{mid}/ESA⁺, CD44⁺/CD24⁺/ESA⁺, and CD44⁻/CD24^{all}/ESA⁺ cells were injected with Matrigel into the mammary fat-pad of six-week-old athymic nu/nu nude mice to assess the in vivo tumorigenicity of the cell fractions. Tumor occurrence and tumor size were monitored after injection.

TABLE 16
Tumor Frequency in Mice Injected with ESA+ cell populations

| | Tumors/Injection (10,000 Cells per Injection) | | | | | | | | | |
|---|---|---|---|---|---|---|---|---|---|---|
| | Wk | Wk | Wk | Wk | Wk | Wk | Wk | Wk | Wk | Wk |
| Population | 7 | 8 | 9 | 10 | 11 | 12 | 13 | 15 | 18 | 22 |
| CD44⁺/CD24⁻/ESA⁺ | 0/5 | 1/5 | 2/5 | 2/5 | 2/5 | 3/5 | 3/5 | 3/5 | 2/4 | 2/4 |
| CD44⁺/CD24⁺/ESA⁺, | 1/5 | 1/5 | 1/5 | 1/5 | 2/5 | 3/5 | 4/5 | 4/5 | 3/4 | 3/4 |
| CD44⁺/CD24^{mid}/ESA⁺, | 0/5 | 0/5 | 0/5 | 3/5 | 4/5 | 4/5 | 4/5 | 5/5 | 5/5 | 4/4 |
| CD44⁻/CD24^{all}/ESA⁺ | 0/5 | 0/5 | 0/5 | 0/5 | 0/5 | 0/5 | 0/5 | 0/5 | 1/5 | 1/5 |

[0802] The CD44⁺/CD24⁺/ESA⁺ cells initiated tumors earlier than any of the other three fractions, however, the CD44⁺/CD24^{mid}/ESA⁺ cells had higher tumor occurrence than other three fractions. Regarding to the tumor growth potential, the CD44⁺/CD24⁺/ESA⁺ cells showed the tumor growth advantage after 17 weeks xenograft compared to the other three fractions. Between weeks 17 and week 22, the CD44⁺/CD24⁺/ESA⁺ tumors rapidly increased in size from approximately 160 mm³ to 750 mm³, while the CD44⁺/CD24^{mid}/ESA⁺ tumors increased in size from approximately 110 mm³ to 290 mm³, and the CD44⁺/CD24⁻/ESA⁺ tumors increased in size from approximately 100 mm³ to 200 mm³. The CD44⁻/CD24^{all}/ESA⁺ cell exhibited the lowest tumor incidence and growth in this experiment.

### Example 36

### Viral replication in CD44⁺/CD24⁺/ESA⁺ and CD44⁺/CD24⁻/ESA⁺ cells

[0803] To test the replication efficiency of vaccinia virus strain GLV-1h68 in sorted EMT-induced GI-101A CD44⁺/CD24⁺/ESA⁺ and CD44⁺/CD24⁻/ESA⁺ cells (Example 34), replication assays were performed as described above (Example 28). The cells were infected with GLV-1h68 at an MOI of 0.01 or 10, followed by determination of viral titers by standard plaque assay at the time points 1, 12, 24, 48 and 72 hours post infection. Average data including standard deviation was calculated for parental GI-101A and CD44⁺/CD24⁻/ESA⁺ cells in comparison to CD44⁺/CD24⁺/ESA⁺ cells. 72 hours post infection, the virus titer of CD44⁺/CD24⁺/ESA⁺ cells was about three times higher than CD44⁺/CD24⁻/ESA⁺ cells upon infection at MOI 0.01 and about eight times higher upon infection at MOI 10.

### Example 37

### Vaccinia Virus GLV-1h68 Treatment of GI-101A CD44⁺/CD24⁺/ESA⁺ Cell-Derived Xenografts

[0804] As shown in Example 35, GI-101A CD44⁺/CD24⁺/ESA⁺ cells had more tumorigenic potential in nude mice and vaccinia virus GLV-1h68 replicated more efficiently in the CD44⁺/CD24⁺/ESA⁺ cells compared to the CD44⁺/CD24⁻/ESA⁺ cells. To test the efficacy of oncolytic vaccinia virus to target and kill breast CSCs in vivo, palpable tumors were established in the mammary fat pads of athymic nu/nu nude mice using sorted GI-101A CD44⁺/CD24⁺/ESA⁺, CD44⁺/CD24⁻/ESA⁺, CD44⁺/CD24⁻/ESA⁺, and CD44⁻/CD24^{all}/ESA⁺ cells (Example 34), and unsorted cells with the dose of 10,000 cells/injection. For comparable results, each mouse was implanted two different cell fractions in left and right mammary fat pads (e.g. 10,000 CD44⁺/CD24⁺/ESA⁺ cells in right fat pad and 10,000 CD44⁺/CD24⁻/ESA⁺ cells in left fad pad and 10,000 CD44⁻/CD24^{all}/ESA⁺ cells in right fat pad and 10,000 CD44⁺/CD24^{mid}/ESA⁺ cells in left fad pad). After 22 weeks tumor implantation, each mouse was injected with 5×10⁶ pfu GLV-1h68 virus via the retro-orbital path. Then the tumor size and tumor GFP expression was monitored weekly. The CD44⁺/CD24⁺/ESA⁺ cell-derived tumor showed dramatic response upon virus treatment and tumor growth was significantly inhibited after the virus treatment. The tumor fluorescence images also indicated that infected tumors derived from CD44⁺/CD24⁺/ESA⁺ cells showed a more efficient vaccine virus replication, which correlation with tumor regression. Vaccinia virus treatment did not show any inhibitory effects on tumor growth of CD44⁻/CD24^{all}/ESA⁺ cells and no GFP expression was detected in vivo.

[0805] These results indicate that GLV-1h68 is selective and effective for infecting and inhibiting tumor derived from cell populations with high tumorigenic potential.

### Example 38

### Detection of CTC Cells in Treated Human Subjects

[0806] Following intravenous injection of the vaccinia virus (3×10⁹ pfu) into a human subject who had colorectal cancer and liver metastases, circulating tumor cells were shown to be infected and were detected 8 days after administration. The patient is part of a clinical trial for which the treatment protocol is as follows (Table 17).

TABLE 17
Treatment protocol

| | Number of treatment days, | |
|---|---|---|
| | starting day 1, day 29, day 57, | |
| Dose per day | day 85, day 113 and day 141 *** | |
| 3 × 10⁹ pfu | 1 day | Final volume of |
| 1.667 × 10⁹ | 3 days | preparation is be |
| pfu | | 50 mL, to be infused |
| | | within 30 minutes |

*** Patients who demonstrate a complete response after 12 weeks are not retreated. Patients with stable disease or a partial response after 12 weeks of treatment will continue to receive repeat dosing in 28-day cycles if they have Grade 2 or less drug-related toxicities.

Treated patients are those with high Circulating Tumour Cells (CTC) levels (>10) with solid tumors (e.g., prostate, colorectal or breast cancer) whose disease can be safely serially biopsied. CTCs are measured the same time as the baseline biopsy, and further circulating tumor cell counts and analyses occur on Cycle 1 Day 8 (±3 days), and prior to dosing on Day 1 of Cycles 2, 3, and 4 to evaluate anti-tumour efficacy and viral delivery.

### Example 39

### Detecting/Isolating Tumor Cells with Antibodies

### A. Anti-NIS Polyclonal Antibodies

[0807] The sequence of human NIS (hNIS) protein is set forth in SEQ ID NO:46. Cells infected with a virus, such as GLV-1h153, which encodes hNIS will express NIS on the surface of the cell such that the extracellular domain should be accessible and bind to antibodies that specifically bind to the extracellular domain.

[0808] To test this, anti-hNIS antibodies sc-134515, sc-48055, sc-48056 and sc-48052 (Santa Cruz Biotechnology, Inc.) were purchased. Antibody sc-134515 is a rabbit polyclonal antibody raised against a peptide corresponding to amino acids 11-52 of hNIS (TFGAWDYGVFALMLLVSTGIGLWVGLARGGQRSAEDFFTGGR (SEQ ID NO:47)). Antibody sc-48055 is an affinity purified goat polyclonal antibody raised against a peptide corresponding to amino acids 1-50 of hNIS (MEAVETGERPTFGAWDYGVFALMLLVSTGIGLWVGLARGGQRSAEDFFTG (SEQ ID NO:48). Antibody sc-48056 is an affinity purified goat polyclonal antibody raised against a peptide corresponding to amino acids 500-550 of hNIS PANDSSRAPSSGMDASRPALADSFYAISYLYYGALGTLTTVLCGALISCLT (SEQ ID NO: 49). Antibody sc-48052 is an affinity purified goat polyclonal antibody raised against a peptide corresponding to amino acids 550-600 of human NIS. Antibody sc-134515 is an affinity purified rabbit polyclonal antibody raised against amino acids 11-52 mapping near the N-terminus of NIS of human origin. The manufacturer of these antibodies, Santa Cruz Biotechnology, Inc., suggested to use the antibody sc-134515 as the most appropriate reagent for this application. This antibody, however, was not effective in capturing virus-infected (GLV-1h153) cells that express hNIS encoded by virus. It appears that the epitope recognized by this antibody is not presented on the surface of these cells.

[0809] Thus, the amino acid sequences of two extracellular regions of hNIS (RGVMLVGGPRQVLTLAQNHSRINLMDFNPDPRSR (SEQ ID NO:50) and YPPSEQTMRVLPSSAARCVALSVNASGLLDPALLPANDSSRAPSSGMDASRPALADS FYA (SEQ ID NO: 51)) were analyzed, and two 14-amino acid polypeptides were identified and were selected as immunizing antigens: 1) hNIS₂₂₅₋₂₃₈, corresponding to amino acids 225-238 of hNIS (NHSRINLMDFNPDP (SEQ ID NO:52)) and 2) hNIS₅₀₂₋₅₁₅, corresponding to amino acids 502-515 of hNIS (NDSSRAPSSGMDAS (SEQ ID NO: 53)).

[0810] Polypeptides hNIS₂₂₅₋₂₃₈ and hNIS₅₀₂₋₅₁₅ were conjugated to keyhole limpet hemocyanin. Rabbits were immunized with each peptide conjugate, using T-Max® Adjuvant (GenScript, Piscataway, N.J.). Polyclonal antibodies raised against peptide hNIS₅₀₂₋₅₁₅ (designated Ab502) and peptide hNIS₂₂₅₋₂₃₈ (designated Ab225) were purified by affinity purification. Binding of the purified polyclonal antibodies Ab502 and Ab225 to hNIS₅₀₂₋₅₁₅ and hNIS₂₂₅₋₂₃₈, respectively, was confirmed by ELISA.

### B. Fluorescence Microscopy

[0811] In vitro binding of polyclonal antibody preparation designated Ab502 to hNIS was measured by fluorescence microscopy. A549 cells infected with GLV-1h153 (hNIS virus) or GLV-1h68 (control virus) were incubated with Ab502 (1.5 μg/mL). Secondary antibody (Donkey anti-rabbit-PE, eBioscience Cat No. 12-4739-81) (0.4 μg/mL) was added, and the cells were observed under a fluorescence microscope. In cells infected with GLV-1h153 and incubated with Ab502, the cell membrane-associated hNIS was clearly visible by fluorescence. This fluorescence was comparable to or greater than the fluorescence observed in cells stained with an anti-CD44 antibody (Mouse Anti-Human CD44-PE, BD Pharmingen Cat No 555479) as a positive control. In control cell stains where Ab502 or the secondary antibody was omitted, fluorescence was not detectable.

### C. Flow Cytometry

[0812] Flow cytometry experiments confirmed that Ab502 binds specifically to GLV-1 h153-infected A549 cells. For detection by flow cytometry, both the primary and the secondary antibody were titrated, and the optimal concentration of Ab502 was determined to be 1 μg/mL, while the optimal secondary antibody concentration (Donkey anti-rabbit-PE, eBioscience Cat No. 12-4739-81) was determined to be 0.5 μg/mL. The flow cytometry experiments were performed using standard protocols, briefly: a) virus-infected or control cells were harvested, counted, washed and incubated with the primary anti-hNIS antibody for 30 minutes on ice; b) the labeled cells were washed and the secondary antibody was added for another 30-min incubation on ice; c) the cells were then washed and fixed with 2% paraformaldehyde; d) flow cytometry analysis was performed on a BD Biosciences FACSCanto II flow cytometer.

[0813] Accordingly, antibody that specifically binds to the epitope recognized by the new antibody Ab502, can be employed to detect and/or isolate cells, particularly tumor cells, infected with a virus, such as vaccinia virus, that encodes hNIS. For ease of detection or isolation of such cells, the antibody can be immobilized on a solid support, such as magnetic beads. Thus, provided is a method for isolating tumor cells from body fluids by administering a virus that encodes hNIS (or other cell surface protein), contacting the cells with antibody that specifically binds to the protein expressed on the surface of the cells, and detecting binding of the antibody and/or isolating bound cells.

### Example 40

### Optimization of VACV-Cytospin CTC Detection Assay

[0814] In this example, an optimal viral dose for infection of tumor cells in blood samples using TurboFP635-expressing vaccinia virus GLV-1h254 was determined. The optimal viral dose was then used to evaluate the capture efficiency, detection efficiency and specificity, as well as infection efficiency, of the VACV-cytospin based CTC assay.

### A. Determining Optimal Viral Dose

[0815] Approximately 90% infection efficiency was observed with a viral dose of 10⁷ pfu/mL and 10⁸ pfu/mL whole blood. Thus, the optimal viral dose for infection of tumor cells in blood samples using TurboFP635-expressing VACV, GLV-1h254, was 10′ pfu/mL of whole blood.

### B. Capture Efficiency, Detection Efficiency and Detection Specificity

[0816] Blood samples were obtained from healthy human donors or from healthy mice. To collect mouse blood samples, mice were anesthetized with 1% to 1.5% isoflurane and the blood was collected from the left ventricle of the heart into EDTA tubes using a 26-G needle (BD Bioscience, San Jose, Calif., USA).

[0817] 1×10⁶ PC-3 cells (ATCC# CRL-1435) were labeled with the green fluorescence dye PKH-67 using the PKH-67 Green Fluorescent Cell Linker Kit for General Cell Membrane Labeling (Sigma-Aldrich, St. Louis, Mo., USA). To spike the accurate number of tumor cells into blood samples, labeled cells were diluted properly so that every 3 μL cell suspension contained about 30˜100 single cells. Three μL of the diluted cell suspension were then loaded onto a glass slide and cells were counted under an epifluorescence microscope (Olympus, Center Valley, Pa., USA), followed by washing cells into a blood sample twice each with 20 μL 1×DPBS (Mediatech, Manassas, Va., USA). Thirty to sixty PC-3 human prostate cancer cells labeled with PKH-67 were spiked into 1 mL of whole blood from healthy human donors or 100 μL whole blood from healthy mice in triplicate. Blood samples from six healthy donors and six healthy mice were tested. All procedures were performed by a single operator.

[0818] The spiked whole blood samples were subjected to red blood cell lysis as previously described below and infected with vaccinia virus. The GLV-1h254 virus stock was diluted in DMEM supplemented with 2% FBS to yield a concentration of 2×10⁷ plaque-forming units (pfu)/mL. Nucleated cells from 1 mL of the human whole blood following red blood cell lysis were resuspended in 0.5 mL of the diluted virus and incubated at 37° C. for 24 h. Nucleated cells from 100 μL of the mouse whole blood following red blood cell lysis were resuspended in 50 μL of the diluted virus and incubated at 37° C. for 24 h.

[0819] Hettich cytospin chambers (Tuttlingen, Germany) were assembled and the cell suspension was directly added into cytospin reservoirs using a funnel card that creates cytospins with a diameter of 8.7 mm. The cells were deposited onto clean glass grid slides (VWR, West Chester, Pa., USA) by centrifugation for 5 minutes at 1,500 rpm using a Hettich Universal 16 centrifuge (Hettich, Germany). Slides were dried for 10 minutes at room temperature. An Olympus IX71 inverted epifluorescence microscope with PictureFrame® software was used to image cells on grid slides. The grids of each slide were checked for CTCs under the microscope one by one. Each experiment was performed in triplicate and six individual human and mouse blood samples were used. Expression of TurboFP635 indicated infection with GLV-1h254 and expression of green fluorescent protein PKH67 indicated tumor cells.

[0820] The capture efficiency was defined as a percentage of spiked cells (PKH67+/DAPI+) captured on a slide over all PKH67 labeled cells spiked into the blood sample. The detection efficiency was defined as a percentage of infected tumor cells (PKH67+/TurboFP635+/DAPI+) captured on a slide over all PKH67 labeled cells spiked into the blood sample. The specificity was defined as a percentage of infected tumor cells (PKH67+/TurboFP635+/DAPI+) over all infected cells (TurboFP635+/DAPI+) captured on a slide. The infection efficiency was defined as a percentage of infected tumor cells (PKH67+/TurboFP635+/DAPI+) over all PKH67 labeled cells captured on a slide

[0821] The assay yielded similar results with the human and mouse blood samples (see Table 18 below). More than 70% of spiked tumor cells were captured on cytospin slides (70% capture efficiency), and more than 65% of spiked tumor cells were detected by virus infection (65% detection efficiency). More than 92% of the cells captured on the cytospin slides were infected by the virus (92% infection efficiency). All (100%) of the infected cells identified on the slides were spiked tumor cells (100% detection specificity).

TABLE 18
Capture efficiency, detection efficiency, infection efficiency
and infection specificity

| | Capture | Detection | Infection | Infection |
|---|---|---|---|---|
| Samples | efficiency | efficiency | efficiency | specificity |
| PC-3/human | 70.61 ± 3.51 | 65.67 ± 4.57 | 92.97 ± 3.72 | 100 |
| blood | | | | |
| PC-3/mouse | 72.69 ± 3.78 | 68.04 ± 4.79 | 93.62 ± 4.70 | 100 |
| blood | | | | |

### C. Specificity of Infection

[0822] To further demonstrate that GLV-1h254 specifically infects only spiked tumor cells, but not healthy blood cells, human and mouse whole blood samples with or without spiked PC-3 cells were infected in parallel with GLV-1h254 after red blood cell lysis. The infected samples were then stained with anti-human or anti-mouse CD45 monoclonal antibodies (FITC conjugated mouse anti-human monoclonal antibody CD45 (clone HI30) (BD Bioscience, San Jose, Calif., USA); FITC conjugated mouse anti-mouse monoclonal antibody CD45 (clone 104) (Abcam, Cambridge, Mass., USA)) to identify the human or mouse leukocytes in the samples. The infected and stained cells were subjected to cytospin deposition and imaging as described in section B above.

[0823] All cells showing high-level expression of TurboFP635 indicating infection with GLV-1h254 were CD45-negative (tumor cells), whereas all cells staining positive for CD45 (healthy cells) showed no TurboFP635 expression, thereby demonstrating that GLV-1h254 specifically infects the tumor cells.

### Example 41

### VACV-Cytospin Assay

[0824] The following example demonstrates the general procedure for the VACV-cytospin assay for detection of CTCs in blood samples using GLV-1h254 as a model virus.

### A. Red Blood Cell Lysis

[0825] Mononuclear cells and circulating tumor cells were enriched from whole blood samples by removing red blood cells with 1×RBC lysis buffer (eBioscience, San Diego, Calif., USA) according to the manufacturer's instruction. For human blood samples, 1 mL of the whole blood was transferred to a 50 mL Falcon tube (Corning, Lowell, Mass., USA) and gently mixed with 10 mL of 1×RBC lysis buffer, followed by incubation for approximately 5 to 10 minutes at room temperature. When the color of the blood changed to a transparent cherry red, the lysis reaction was immediately stopped by diluting the lysis buffer with 30 mL of 1×DPBS. For mouse blood samples, 0.1 mL of the whole blood was transferred to a 15 mL Falcon tube (Corning Life Science, Union City, Calif., USA) and gently mixed with 1 mL of 1×RBC lysis buffer, followed by incubation for approximately 5 to 10 minutes at room temperature. When the color of the blood changed to a transparent cherry red, the lysis reaction was immediately stopped by diluting the lysis buffer with 3 mL of 1×DPBS. The cells were then centrifuged using the Sorvall® Legend RT centrifuge (Sorvall, Germany) at 300×g for 5 minutes at room temperature. The cell pellet was carefully resuspended in an appropriate buffer (see below).

### B. Vaccinia Virus (VACV) Infection

[0826] The GLV-1h254 virus stock was diluted in DMEM supplemented with 2% FBS to yield a concentration of 2×10′ plaque-forming units (pfu)/mL. Nucleated cells from 1 mL of the whole blood following red blood cell lysis were resuspended in 0.5 mL of the diluted virus (e.g., half the volume of the sample) and incubated at 37° C. for 24 h.

### C. Immunofluorescence Staining and Cell Deposition

[0827] The following antibodies were used to identify and characterize CTCs: FITC conjugated mouse anti-human monoclonal antibody EpCAM (clone EBA-1) (BD Bioscience, San Jose, Calif., USA), FITC conjugated mouse anti-human monoclonal antibody CD45 (clone HI30) (BD Bioscience, San Jose, Calif., USA), FITC conjugated mouse anti-human monoclonal antibody pan-cytokeratin (CK, clone C-11) (Abcam, Cambridge, Mass., USA), FITC conjugated mouse anti-human monoclonal antibody CD44 (clone G44-26) (BD Bioscience, San Jose, Calif., USA), FITC conjugated mouse anti-human monoclonal antibody CD45 (clone 104) (Abcam, Cambridge, Mass., USA), FITC conjugated mouse anti-human monoclonal antibody carcinoembryonic antigen (CEA, CD66) (clone B1.1/CD66) (BD Bioscience, San Jose, Calif., USA), FITC conjugated mouse anti-human monoclonal antibody Progesterone Receptor (clone SP2) (Abcam, Cambridge, Mass., USA), FITC conjugated mouse anti-human monoclonal antibody HER-2/neu (clone Neu 24.7) (BD Bioscience, San Jose, Calif., USA), purified mouse anti-human monoclonal antibody MITF (clone D5) (Santa Cruz Biotechnology, Santa Cruz, Calif., USA), purified mouse anti-human monoclonal antibody Melan-A (clone A103) (Santa Cruz Biotechnology, Santa Cruz, Calif., USA), purified mouse anti-human monoclonal antibody ALDH (clone 44/ALDH) (BD Bioscience, San Jose, Calif., USA), purified mouse anti-human monoclonal antibody N-Cadherin (clone 32/N-Cadherin) (BD Bioscience, San Jose, Calif., USA) and purified mouse anti-human monoclonal antibody Vimentin (clone V9), FITC conjugated goat anti-mouse polyclonal secondary antibody IgG-H & L (Abcam, Cambridge, Mass., USA).

[0828] Immunofluorescence staining procedures were performed according to the manufacturer's instructions. In brief, nucleated cells from 1 mL of the whole blood following red blood cell lysis were resuspended in 0.5 mL of 4% paraformaldehyde and fixed for 5 minutes, followed by washing with 1×DPBS and incubation with antibodies at room temperature for 30 minutes. For staining of cells with non-fluorescence conjugated primary antibodies, the further incubation with secondary antibodies conjugated with a fluorescence dye was applied. An additional permeabilization step with 0.5 mL of cold methanol for 5 minutes before antibody incubation was required if an intracellular antigen (e.g. cytokeratin) was needed to be detected.

[0829] After staining, the cells were washed once with 1×DPBS and resuspended in 1 mL of 1×DPBS. Hettich cytospin chambers (Tuttlingen, Germany) were assembled and the stained cell suspension was directly added into cytospin reservoirs using a funnel card that creates cytospins with a diameter of 8.7 mm. The cells were deposited onto clean glass grid slides (VWR, West Chester, Pa., USA) by centrifugation for 5 minutes at 1,500 rpm using a Hettich Universal 16 centrifuge (Hettich, Germany). Slides were dried for 10 minutes at room temperature. The 4′,6-diamidino-2-phenylindole (DAPI) HardSet mounting medium (Vector Laboratories, Burlingame, Calif., USA) was used for cell nuclei staining.

D. Visualization and enumeration of CTCs

[0830] An Olympus IX71 inverted epifluorescence microscope with PictureFrame® software was used to image cells on grid slides. The grids of each slide were checked for CTCs under the microscope one by one. Captured images (at 640× of total magnification) were carefully examined and the objects that met preset criteria were counted. Color, brightness, and morphometric characteristics such as cell size, shape, and nuclear size were considered in identifying potential CTCs and excluding nonspecific cells. Infected CTCs showed very strong TurboFP635 expression together with staining positive for epithelial cell adhesion molecule (EpCAM), pan-cytokeratin (CK) and DAPI, but negative for CD45, and met the morphologic characteristics consistent with malignant cells, including large cellular size, high nuclear to cytoplasmic ratio, and visible nucleoli, were scored as CTCs. Cell counts were expressed as the number of cells per actual volume of the blood sample.

### Example 42

### Detection and Identification of Live Human CTCs in Blood Samples from Mice Bearing Human Tumor Xenografts

[0831] In this example, live human CTCs were detected and identified in blood samples from mice bearing human tumor xenografts, including a prostate cancer model using PC-3 tumor cells and a late-stage non-small cell lung cancer model using A549 cells.

### A. Mouse Tumor Xenograft Models

[0832] The human prostate cancer cell line PC-3 and the human lung carcinoma cell line A549 were purchased from the American Type Culture Collection (ATCC). A549 cells were cultured in RPMI 1640 (Mediatech, Manassas, Va., USA) supplemented with 10% FBS (Mediatech, Manassas, Va., USA). PC-3 cells were cultured in DMEM (Mediatech, Manassas, Va., USA) supplemented with 10% FBS (DMEM-10).

[0833] Mice were cared for in accordance with approved protocols by the Institutional Animal Care and Use Committee of Explora Biolabs (San Diego Science Center, San Diego, Calif., USA). Cardiac puncture was used for serial studies of CTC detection. Blood samples (˜100 μL) were collected into EDTA tubes using a 26-G needle (BD Bioscience, San Jose, Calif., USA) inserted into the chest over the point of maximal impulse from the heart and blood samples (˜1 mL) were collected by this same route when mice were euthanized at the end of experiments. This procedure was performed without assistance from a needle holder or other external guidance system.

[0834] Five- to six-week old nude mice (NCI:Hsd:Athymic Nude-Foxn1nu; Harlan, Indianapolis, Ind., USA) were implanted subcutaneously with 5×10⁶ PC-3 or A549 cells (in 100 μL PBS) on the right hind leg. Tumor growth and mouse weight were monitored weekly. 100 μL of whole blood samples were taken from these mice by cardiac puncture for CTC analysis were lysed, infected with 50 μL 2×10⁷ pfu/mL GLV-1h254 and analyzed using the VACV-cytospin assay described in Example 41.

### B. Human Prostate Cancer Xenograft

[0835] Infection of blood samples from PC-3 xenografts with GLV-1h254 ex vivo revealed microscopically that infected cells were much larger than surrounding CD45⁺ immune cells, displayed bright TurboFP635 fluorescent signal, contained nuclei, and were CD45. These infected cells were also CK⁺ or EpCAM⁺, indicating that the infected cells were of epithelial origin, as expected for PC-3-derived CTCs.

### C. Human Late-Stage Non-Small Cell Lung Cancer Xenograft

[0836] Infection of blood samples from A5649 xenografts with GLV-1h254 ex vivo revealed microscopically that CTCs were detected and identified as TurboFP635⁺/CD45⁻/DAPI⁺ cells.

[0837] The results indicate GLV-1 h254 is tumor-specific for human CTCs in mice bearing human cancer xenografts.

### Example 43

### Detection and Identification of Live CTCs in Blood Samples from Patients with Cancer

[0838] In this example, CTCs were detected and identified in blood samples from human cancer patients.

### A. Breast Cancer

[0839] Whole blood samples from seven patients with breast cancer were analyzed using the VACV-cytospin assay described in Example 41. The volume of each sample varied from 5 to 15 mL.

[0840] Live CTCs were detected in three patients. CTCs were not detected in the remaining four patients (4-7 mL samples). To confirm the absence of CTCs in these patients, the same blood samples were analyzed using immunostaining for CK and EpCAM. Again, CTCs were not detected.

[0841] Patient BC1 had stage III breast cancer with histological diagnosis of estrogen receptor (ER)− negative, progesterone receptor (PR)-negative and human epidermal growth factor receptor 2 (HER2/neu)−negative, indicating an aggressive disease, and had been undergoing chemotherapy and irradiation treatments before the blood sample was drawn. The VACV-cytospin assay detected a total of 66 live CTCs in a 5.5 mL whole blood sample. The CTCs identified by GLV-1h254 (TurboFP635⁺/CD45⁻/DAPI⁺) were also CK⁺ or EpCAM⁺.

[0842] Another patient, BCS, had stage I breast cancer with histological diagnosis of ER⁻, PR⁺ and HER2/neu⁺. Fifteen live CTCs were detected in a 5 mL blood sample from this patient. These live CTCs showed not only EpCAM expression, but also PR and HER2/neu expression consistent with the histological diagnosis. Similar to patient BC1, patient BC7 also had stage III breast cancer with histological diagnosis of ER⁻, PR⁻ and HER2/neu⁻. Patient BC7 had been undergoing chemotherapy, irradiation and trastuzumab treatments before the blood sample was drawn. Only 3 live CTCs were found in a 3 mL blood sample. The CTCs were identified as TurboFP635⁺/CK⁺/DAPI⁺ cells.

### B. Other Types of Cancer

[0843] Blood samples were analyzed from patients with metastatic colorectal cancer, lung cancer and melanoma using the VACV-cytospin assay described in Example 41.

[0844] Patient CC 1 with metastatic colorectal cancer had been undergoing chemotherapy and bevacizumab treatments before the whole blood sample was drawn. Forty-one live CTCs were detected in a 5 mL blood sample from this patient. These infected live CTCs were confirmed as TurboFP635⁺/EpCAM⁺ or CK⁺/CD45⁻/DAPI⁺ cells.

[0845] The lung cancer patient LC1 with brain metastases had not been undergoing any treatment. Fourteen live CTCs were identified in a 5 mL blood sample from this patient. These live CTCs also displayed EpCAM expression.

[0846] Twenty-four live CTCs were detected by GLV-1h254 in a 5 mL whole blood sample from the patient MM1 with malignant metastatic cutaneous melanoma and these CTCs were confirmed to express melanoma markers microphthalmia-associated transcription factor or Melan-A.

[0847] The results indicate GLV-1h254 is tumor-specific for human CTCs in patients with cancer.

### Example 44

### Side-by-Side Comparison of VACV-Cytospin Assay and CellSearch® System

[0848] In this example, blood samples from 10 patients with metastatic breast cancer and colon cancer were evaluated for CTCs in a side-by-side comparison using the VACV-cytospin assay and CTC detection using the CellSearch® system.

[0849] From each patient, one 7.5 mL blood sample was collected in a CellSave® tube and shipped to the Genoptix Laboratory (Carlsbad, Calif.) for CTC detection using the CellSearch® system and a second 7.5 mL blood sample from the same blood draw was collected in EDTA tubes and analyzed for CTCs using the VACV-cytospin assay described in Example 41. The live CTCs identified by VACV were confirmed with immunostaining as turboFP635⁺/CK⁺/CD45⁻/DAPI⁺, as well as having morphologic characteristics consistent with malignant cells, including large cellular size, a high nuclear to cytoplasmic ratio, and visible nucleoli. CellSearch® samples were analyzed as previously described (Miller et al. (2010) J Oncol 2010:617421; Allard et al. (2004) Clin Cancer Res 10:6897-6904). A CTC was defined according to the criteria of round to oval morphology, cell size more than 4 μm, DAPI positive nucleus, CK positive staining, and absence of CD45 expression. CTC number was reported per 7.5 ml of blood. The sensitivity, accuracy, linearity, and reproducibility of the CellSearch® system have been previously described (Allard et al. (2004) Clin Cancer Res 10:6897-6904; Reithdorf et al. (2007) Clin Cancer Res 13:920-928).

[0850] The results are set forth in Table 19 below, where the values indicate the number of CTCs per 7.5 mL of blood. The results indicate both assays detected CTCs in patients 1-4. In addition, the VACV-cytospin assay detected 2 CTCs in patient 7, but no CTCs were detected in this patient by the CellSearch® system. Neither assay detected any CTCs in the remaining 5 patients. The VACV-cytospin assay detected slightly more CTCs in patients 1 and 2, but a few less CTCs in patient 3 than the CellSearch® system. The CellSearch® system detected 103 CTCs in patient 4 while only 5 CTCs were identified using the VACV-cytospin assay, indicating most of the CTCs in patient 4 might not be alive since the CellSearch® assay detects live and dead CTCs whereas the VACV-cytospin assay only detects live CTCs.

TABLE 19
Comparison of VACV-cytospin assay and CellSearch ® system

| Patient ID | 01 | 02 | 03 | 04 | 05 | 06 | 07 | 08 | 09 | 10 |
|---|---|---|---|---|---|---|---|---|---|---|
| CTC # | 7 | 27 | 5 | 103 | 0 | 0 | 0 | 0 | 0 | 0 |
| (CellSearch ®) | | | | | | | | | | |
| Live CTC # | 10 | 35 | 2 | 5 | 0 | 0 | 2 | 0 | 0 | 0 |
| (VACV) | | | | | | | | | | |

### Example 45

### Characterization of CTCs Identified in Blood Samples from Mice with Human Tumor Xenografts and Patients with Cancer

[0851] Studies have indicated that circulating tumor cells (CTCs) are linked to cancer stem cells (CSCs) and the epithelial-mesenchymal transition (EMT) process (see, e.g., Bonnomet et al. (2010) J Mammary Gland Biol Neoplasia 15:261-273 and Pierga et al. (2008) Clin Cancer Res 14:7004-7010). To elucidate the relationship of CTCs with CSCs and EMT, CTCs were analyzed for the expression of CSC and EMT markers, including CD44, aldehyde dehydrogenase 1 (ALDH1), vimentin and N-cadherin, as described in Example 41, In addition, single-cell measurements were performed to compare the nuclear size of identified CTCs and adjacent nucleated blood cells. Cell images were analyzed by ImageJ software (NIH, Bethesda, Md., USA) and the nuclear diameter was measured using the plugins of ImageJ.

[0852] The CTCs identified with GLV-1h254 in mice bearing human PC-3 prostate cancer xenografts (Example 42) displayed high levels of expression of the CSC markers CD44 and aldehyde dehydrogenase 1 (ALDH1) as well as the EMT markers vimentin and N-cadherin. Furthermore, the CTCs identified with GLV-1h254 in the breast cancer patients BC 1 and BCS (Example 43) showed high-level expression of CD44 and ALDH1, respectively. The features of CSCs as well as phenotypic change characteristics of the EMT possessed by CTCs might allow them to disseminate effectively during the progress of cancer metastases, resulting in the formation of secondary tumors by extravasation and colonization in distant organs.

[0853] The diameters of the live CTC nuclei ranged from 1.3 to 5.5 times greater than that of neighboring white blood cells, demonstrating evidence of the heterogeneity of CTCs in size.

### Example 46

### Detection and Identification of Live Cancer Cells in CSF Samples from Patients with Cancer

[0854] Cerebrospinal fluid (CSF) samples from seven patients with glioblastoma multiforme, metastatic colorectal carcinoma, metastatic breast cancer and metastatic esophageal cancer were analyzed using the VACV-cytospin assay described in Example 41.

[0855] CSF samples were collected at the Moores Cancer Center, University of California, San Diego (La Jolla, Calif., USA). All enrolled patients gave their informed consent for study inclusion and were enrolled using institutional review board approved protocols. Three to five mL CSF from each patient was collected. CSF samples were maintained at room temperature for delivery and processed within a maximum of 24 hours after CSF draw. The collected CSF samples were concentrated by centrifugation using the Sorvall® Legend RT centrifuge (Sorvall, Germany) at 300×g for 5 minutes at room temperature. The cell pellet was carefully resuspended in an appropriate buffer. Cells were counted after staining with trypan blue (Mediatech, Manassas, Va., USA) to determine the number of viable cells. Vaccinia virus (VACV) GLV-1h254 infection and immunofluorescence staining were performed as described in Example 41 above. Subsequently all the cells from CSF of one patient were deposited in one grid slide by cytospin as described for CTCs above. Thereafter, cells on the slide were imaged and enumerated under an epifluorescence microscope.

[0856] The results showed that a total of 23 TurboFP635⁺ cells (vaccinia infected cells) with large nuclei were found in the 3 mL CSF sample from patient CSF7 having metastatic breast cancer. Among these, 16 cells showed high-level expression of CK and the rest of infected cells showed very low level or no expression of CK. No infected cells were found in the CSF samples from other six patients. To confirm the absence of cancer cells in these six CSF samples, infected samples were further analyzed using immunostaining for CK. No CK⁺ cells were detected in these six patients that were negative for TurboFP635 (not infected with vaccinia virus).

### Example 47

### Prevention and Therapy of CTCs in Mice Bearing Human Prostate Cancer Xenografts

[0857] Nude mice were implanted with the modified human prostate cancer cell line PC-3-RFP expressing red fluorescent protein (RFP) (see Example 2A above) to facilitate CTC detection using the ClearBridge biochip.

[0858] Five- to six-week old male nude mice (NCI:Hsd:Athymic Nude-Foxn1nu; Harlan, Indianapolis, Ind., USA) were implanted subcutaneously with 5×10⁶PC-3-RFP cells in 100 μL PBS on the right hind leg. Tumor growth and mouse weight were monitored weekly. Groups of 8 mice were treated with a single dose of 5×10⁶ pfu of GLV-1h68 (in 100 μL of PBS) either at 4 weeks (early treatment) or 7 (late treatment) weeks after tumor cell implantation. Mice treated with PBS at 4 weeks after tumor cell implantation were used as controls. Mice were monitored weekly for CTCs using Clearbridge BioMedics CTC0 Capture System Prototype (as described in Example 11A above). 100 μL of blood were drawn from mice through heart puncture and 80 μL were run through the biochip. CTCs captured on the biochip were visualized and counted under a fluorescent microscope.

[0859] No CTCs were detected in any of the mice through 4 weeks after tumor cell implantation (prior to any treatment). All mice in the PBS-treated control group were CTC positive at one or more time points starting at 5 weeks after tumor cell implantation. In contrast, only one animal in the GLV-1h68 early treatment group had any detectable CTC's after virus treatment (3, 1, and 2 CTCs at 2, 3, and 4 weeks after treatment, respectively). Thus, early treatment significantly reduced CTC formation in mice bearing human prostate cancer tumors.

[0860] Mice in the late treatment group had a significant number of CTCs before virus treatment, ranging from 12 to 103 CTCs per 80 μL of blood. A decrease in CTC numbers was observed one week after virus treatment. At 1 week after treatment, 52.9% of CTCs were GFP positive, and thus were infected by GLV-1h68. At 2 weeks after treatment, the number of CTCs remained at reduced levels, and almost all CTCs (99.6%) were GFP positive (infected by GLV-1h68).

[0861] While primary tumors kept growing in the PBS group, early and late treatments with GLV-1h68 resulted in tumor regression and significantly prolonged survival in comparison with PBS treatment. The average survival days were 126.3 and 97.3 days for the early and late treatment groups, respectively, versus 52.7 days for the PBS treatment group.

[0862] At death or at the end of the experiment, all mice were dissected and metastases were examined under a fluorescent stereo microscope. All mice in the PBS control group had detectable lumbar and renal lymph node metastases. In contrast, only 1 out of 8 mice in the early treatment group had a slightly enlarged lumbar lymph node, with the other mice in this group having no detectable lumbar or renal lymph node metastases. Although all mice in the late treatment group had detectable lumbar and renal lymph node metastases, these metastases were smaller in size compared to those in mice in the PBS group.

### Example 48

### Therapy of Metastatic Cancer Cells in the Ascites of a Patient with Peritoneal Carcinomatosis from Gastric Cancer

[0863] Tumor cell-containing ascites from a patient with peritoneal carcinomatosis (PC) from gastric cancer that was intraperitoneally treated with GL-ONC1 (clinical version of GLV-1h68) were analyzed.

[0864] Ascites were isolated three and seven days after the first intraperitoneal treatment with 10⁷ pfu of GLV-1h68. First, the concentration of cells found in the ascitic fluid of the patient was determined. Then, the cells were spun down by centrifugation, followed by fixation of the cell pellet in formalin (4%, Fischer, Germany) to a final concentration of 1×10⁶ cells/mL. After a repeated centrifugation of this cell suspension, the supernatant was discarded and the cell pellet was resuspended in a few drops of the remaining supernatant. This suspension was collected and mixed with hot agar (1% agarose), cooled down, placed into a histology cassette and fixed again in formalin (4%). The cassette was then processed like a routine surgical specimen and was embedded in paraffin. From the resulting cell blocks, sections of 4 μm thickness were cut, deparaffinised and rehydrated by passages through xylene and graded alcohol and finally stained with haematoxylin and eosin for morphologic evaluation. Then, subsequent sections were mounted on slides and collected for IHC staining.

[0865] Staining was performed using an automated immunohistochemistry staining system (VENTANA Benchmark; Ventana Medical Systems, Tucson, Ariz., USA), using reagents from VENTANA according to the manufacturer's protocol. Shortly, the slides were incubated with primary antibodies VACV-A27L (Genelux, Calif., USA); anti-EpCAM antibody Ber-EP4 (Dako, Germany) and visualized using iView DAB detection kit (Ventana) with horseradish peroxidase and DAB as chromogen. After DAB staining, slides were counterstained with haematoxylin, washed, dehydrated in a graded alcohol series and mounted with Cytoseal™ mounting medium (Fisher Scientific, Germany). The study was approved by the Paul-Ehrlich-Institut, Germany and the trial was registered on clinicaltrials.gov (number NCT01443260). Written, informed consent was obtained from the patient.

[0866] Using either anti-EpCAM or anti-vaccinia specific antibodies, about 5% of all cells were found to be EpCAM-positive three days after treatment, and only about 5-10% of these cancer cells were vaccinia virus positive at the same time point. In contrast, four days later (i.e., 7 days after treatment), less than 2% of all ascitic cells were still EpCAM-positive, and more than 90% of these cancer cells were vaccinia virus positive. These results indicate that GLV-1h68 effectively removes live tumor cells in the ascites of patients with peritoneal carcinomatosis (PC).

[0867] Since modifications will be apparent to those of skill in this art, it is intended that this invention be limited only by the scope of the appended claims.

What is claimed:

1. A method for testing for or monitoring efficacy of treatment with an oncolytic virus for treatment of solid tumors, other cancers and metastatic diseases, comprising testing a body fluid sample obtained from a subject to whom an oncolytic reporter virus has been administered to identify any tumor cells that circulate in the body fluid by detecting the oncolytic reporter virus in tumor cells the sample, wherein:
testing is performed at a pre-determined time following administration of the virus, wherein the predetermined time is a time sufficient for the virus to infect a tumor cell in the subject, but before efficacious therapy would shrink tumors or eliminate any circulating tumor cells (CTCs); and
detection of the reporter virus in tumor cells in the body fluid sample is indicative that the treatment with the oncolytic virus is or will be efficacious.

2. The method of claim 1, wherein the tumors comprise solid tumors, and the tumor cells in the body fluids comprise circulating tumor cells (CTCs) from the tumors.

3. The method of claim 1, further comprising:
if the reporter virus is detected in tumor cells in the body fluid sample indicating that treatment is efficacious, initiating or continuing treatment with the oncolytic reporter virus or with an oncolytic virus that is the same as the reporter virus, except that it does not contain the reporter gene or it encodes a therapeutic protein in addition to or in place of the reporter gene; or,
if the reporter virus is not detected in tumor cells in the body fluid sample, discontinuing treatment with the oncolytic reporter virus or with an oncolytic virus that is the same as reporter virus, except that it does not contain the reporter gene.

4. The method of claim 1, wherein the body fluid sample is tested in vitro after obtaining the body fluid sample from a subject.

5. The method of claim 1, wherein, prior to testing,
the oncolytic reporter virus was administered at a dosage sufficient to be detected but that is lower than a dosage for treatment; or
the oncolytic reporter virus was administered at a dosage for treatment of a tumor or cancer.

6. The method of claim 1, wherein the sample is from a subject having a solid tumor.

7. The method of claim 1, wherein prior to testing, the method comprises enriching tumor cells in the sample to produce an enriched sample.

8. The method of claim 1, wherein:
if the treatment is efficacious as evidenced by detection of reporter virus, continuing treatment of the subject by administering an oncolytic virus for treatment; and
the oncolytic virus for treatment is the same oncolytic reporter virus or is an oncolytic virus where the reporter gene is not present, or the oncolytic virus, with or without the reporter gene, comprises heterologous nucleic acid encoding a therapeutic protein.

9. The method of claim 1, wherein:
detecting of tumor cells is performed to monitor treatment of the subject; and
the body fluid sample is tested at a pre-determined time or pre-determined intervals following administration of the virus;
the predetermined time is at least sufficient for the virus to infect tumor cells; and
changes in the number of detected tumor cells compared to a control sample or the initial sample is an indicator of the progress of treatment.

10. The method of claim 9, wherein:
the samples are obtained prior to 24 days after first administering the virus;
if the number of infected tumor cells in the sample is substantially the same or increased compared to the control or initial sample, then the treatment is continued or accelerated;
if the number of infected tumor cells in the sample is reduced compared to the control, then the treatment is reduced or discontinued; and
if no infected tumor cells are detected, then the treatment is discontinued.

11. The method of claim 9, wherein the control is a sample is of the same bodily fluid from a healthy subject, is a baseline sample from the subject prior to treatment with the oncolytic virus, is a sample from a subject after a previous dose of oncolytic virus, or is a sample from a subject prior to the last dose of oncolytic virus, or is a sample from a subject prior to the last dose of oncolytic virus or is an initial sample from the subject prior to the first dose or immediately after the first dose.

12. The method of claim 9, wherein:
the samples are from a subject to whom a dosage or regiment for treatment of the tumor or cancer was administered;
the samples are obtained more than at least about 24 or at least about 30 days after first administering the virus;
if the number of infected tumor cells in the sample is substantially the same or increased compared to the control or initial sample, then treatment is discontinued;
if the number of infected tumor cells in the sample is reduced compared to the control, then the treatment continued.

13. The method of claim 1, wherein the predetermined time is no more than 6 hours, 12 hours, 18 hours, 1 day, 2 days, 3 days, 4 days, 5 days, 6 days, 7 days, 8 days, 9 days, 10 days, 11 days, 12 days, 13 days, 14 days, 15 days, 16 days, 17 days, 18 days, 19 days, 20 days, 21 days, 22 days, 23 days or 24 days following administration of the virus, wherein detection of virus in tumor cells in the sample indicates that the virus has infected tumor cells, and, thus, is predicted to be an efficacious treatment.

14. The method of claim 13, wherein treatment is predicted to efficacious, and the method comprises administering an oncolytic reporter virus once or a plurality of times for treatment of the subject.

15. The method of claim 1, wherein the body fluid sample is a sample selected from blood, peripheral blood, lymph, bone marrow fluid, pleural fluid, peritoneal fluid, spinal fluid, abdominal fluid, pancreatic fluid, cerebrospinal fluid (CSF), brain fluid, ascites, urine, saliva, bronchial lavage, bile, sweat, tears, ear flow, sputum, semen, vaginal flow, milk, amniotic fluid, or secretions of the respiratory, intestinal or genitourinary tract, or is a sample that contains dissociated bone marrow cells from a bone marrow biopsy.

16. The method of claim 1 that is for monitoring therapy, wherein:
the sample is tested after 24 days as treatment progresses to assess whether there is decrease in reporter virus and, thus, tumor cells; and
a decrease in tumor cells indicates that treatment is effective.

17. The method of claim 1, wherein a body fluid sample is obtained a plurality of times at successive time points following administration of the virus, whereby a plurality of samples are obtained from the subject.

18. The method of claim 7, wherein enriching tumor cells from the sample comprises selecting tumor cells from the sample or removing non-tumor cells from the fluid sample.

19. The method of claim 7, wherein enriching tumor cells in the sample comprises capturing or selecting cells based upon larger size, shear modulus, increased stiffness, reduced deformability, increased density or expression of a surface moiety or moieties.

20. The method of claim 7, comprising enriching tumor cells in the sample by separating tumor cells from non-tumor cells in using one or more of microfluidic device, a microfilter, a density gradient, immunomagnetic separation and acoustophoresis.

21. The method of claim 7, wherein:
enriching tumor cells is effected with a microfluidic device through which the cells flow, wherein the device comprises an array of isolation wells; and
each isolation well comprises:
a cell trap that prevents the passage of tumor cells and permits the passage of non-tumor cells and other components of the fluid sample; or
a cell trap that prevents the passage of non-tumor cells and permits the passage of tumor cells in the fluid sample.

22. The method of claim 21, wherein:
the microfluidic device separates tumor cells based on deformability, size and/or stiffness; and
the microfluidic device comprises one or more linear channels, wherein each linear channel has a length and a cross-section of a height and a width defining an aspect ratio adapted to isolate tumor cells along at least one portion of the cross-section of the channel based on reduced deformability or larger size of tumor cells as compared to non-tumor cells, wherein tumor cells flow along a first portion of the channel to a first outlet and non-tumor cells flow along a second portion of the channel to a second outlet.

23. The method of claim 7, wherein enriching tumor cells comprises separating tumor cells from non-tumor cells based on expression of a moiety on the tumor cell surface.

24. The method of claim 23, wherein the tumor cells are separated by contacting the sample with a device, chip or bead, wherein the device, chip or bead contains an immobilized capturing agent that specifically binds to a moiety on the tumor cell surface to thereby effect capture of the tumor cell.

25. The method of claim 23, wherein the cell surface moiety is a cytokeratin or EpCam.

26. The method of claim 24, wherein the capturing agent is an antibody, an antibody fragment, a receptor or a ligand binding domain.

27. The method of claim 1, wherein detecting the oncolytic reporter virus in a sample is effected by a method selected from among flow cytometry, fluorescence microscopy, fluorescence spectroscopy, magnetic resonance spectroscopy and luminescence spectroscopy.

28. The method of claim 1, wherein the reporter virus encodes a reporter gene product that is inserted into or in place of a non-essential gene or region in the genome of the virus.

29. The method of claim 15, wherein:
the body fluid is CSF; and
leptomeningeal metastases (LM) are detected.

30. The method of claim 15, wherein:
the body fluid is peritoneal fluid; and
the method effects diagnosis of peritoneal carcinomatosis by detecting tumor cells in the peritoneal fluid.

31. The method of claim 1, wherein subject has a cancer of the lung, breast, colon, brain, prostate, liver, pancreas, esophagus, kidney, stomach, thyroid, bladder, uterus, cervix or ovary.

32. The method of claim 1, wherein the subject has metastatic cancer.

33. The method of claim 1, wherein the oncolytic virus or oncolytic reporter virus is a vaccinia virus.

34. The method of claim 33, wherein the oncolytic virus or oncolytic reporter virus is a Lister strain virus.

35. The method of claim 34 virus is an LIVP virus, a clonal strain of an LIVP virus, or a modified form thereof containing nucleic acid encoding a heterologous gene product.

36. The method of claim 1, wherein the virus comprises nucleic acid encoding a heterologous gene product that is a therapeutic or diagnostic agent.

37. The method of claim 1, wherein the reporter virus comprises a reporter gene that encodes a fluorescent protein, a bioluminescent protein, a receptor or an enzyme.

38. The method of claim 37, wherein the fluorescent protein is selected from among a green fluorescent protein, an enhanced green fluorescent protein, a blue fluorescent protein, a cyan fluorescent protein, a yellow fluorescent protein, a red fluorescent protein, or a far-red fluorescent protein.

39. The method of claim 38, where the fluorescent protein is designated TurboFP635.

40. The method of claim 37, wherein the reporter gene encodes an enzyme is selected from among a luciferase, β-glucuronidase, β-galactosidase, chloramphenicol acetyl transferase (CAT), alkaline phosphatase and horseradish peroxidase, or encodes a receptor that binds to a detectable moiety or a ligand attached to a detectable moiety.

41. The method of claim 1, wherein the oncolytic virus comprises nucleic acid that encodes a protein that is expressed on the surface of the infected cell; and detection of the virus is effected by detecting the protein expressed on the surface of the infected cell.

42. The method of claim 41, wherein the cell surface protein is a receptor or transporter protein.

43. The method of claim 41, wherein the cell surface protein is a sodium ion transporter.

44. The method of claim 43, wherein the sodium ion transporter is a norepinephrine transporter (NET) or the sodium iodide symporter (NIS).

45. The method of claim 44, wherein the NIS or NET is a human NIS or NET protein.

46. The method of claim 41, wherein detection is effected by contacting the cells with an antibody that specifically binds to an epitope on the extracellular domain of the protein expressed on the cell surface.

47. The method of claim 46, wherein the antibody comprises a polyclonal antibody preparation or is a monoclonal antibody.

48. The method of claim 46, wherein the antibody is linked to a magnetic bead for separating cells that express the cell surface protein to thereby isolate virus-infected cells.

49. The method of claim 43, wherein:
the antibody specifically binds to an epitope in the NIS protein.

50. The method of any of claim 50, wherein the antibody specifically binds to a polypeptide that comprises the sequence NDSSRAPSSGMDAS (SEQ ID NO: 53) or an epitope therein.

51. The method of claim 41, wherein the oncolytic virus is a lister strain vaccinia virus.

52. The method of claim 51, wherein the lister strain virus is the virus designated GLV-1h68 or a derivative thereof or is an LIVP clonal strain.

53. A method of detecting a viable tumor cells in a body fluid sample, comprising:
a) enriching tumor cells in a body fluid sample from a subject administered an oncolytic reporter virus to produce an enriched sample; and
b) detecting the reporter virus in tumor cells in the sample, thereby detecting viable tumor cells in the sample.

54. A method of detecting a tumor cell in a body fluid sample, comprising testing a body fluid sample from a subject, wherein the subject has not been treated with an oncolytic reporter virus, the method comprising:
a) enriching tumor cells from the sample to produce an enriched sample;
b) contacting tumor cells from the sample with an oncolytic reporter virus; and
c) detecting the oncolytic reporter virus, thereby detecting tumor cells in the sample.

55. The method of claim 54, wherein detecting tumor cells in the sample indicates that the oncolytic virus is a candidate for treatment of the tumor.

56. The method of claim 54, wherein detection of tumor cells indicates that the subject has a tumor.

57. A method for detecting viable circulating tumor cells, comprising:
a) detecting tumor cells in a body fluid sample that is infected with an oncolytic reporter virus, wherein:
the sample is obtained from a subject who has been administered an oncolytic reporter virus; and
the tumor cells are detected by detecting a tumor cell marker;
b) optionally enriching tumor cells in the sample to produce an enriched sample; and then
c) detecting tumor cells with the tumor cell marker that are infected with the virus by detecting the oncolytic reporter virus, whereby detection of infected tumor cells effects detection of viable circulating tumor cells.

58. The method of claim 57, wherein the tumor cell marker is an epithelial cell marker or cancer stem cell marker.

59. The method of claim 58, wherein the body fluid is cerebrospinal fluid or peritoneal fluid.

60. The method of claim 59, wherein:
the body fluid is cerebrospinal fluid, and detection of circulating tumor cells in the cerebrospinal fluid indicates the subject has leptomeningeal metastases; or
the body fluid is peritoneal fluid, and detection of circulating tumor cells in the peritoneal fluid indicates that the subject has peritoneal carcinomatosis.

61. A method of assessing prognosis of a cancer, comprising testing a body fluid sample from a subject by:
a) enriching tumor cells in the sample to produce an enriched sample;
b) contacting the sample or enriched sample or cells from the same with an oncolytic reporter virus; and
c) identifying cancer stem cells by:
i) detecting the oncolytic reporter virus to identify cells infected with the virus and from the identified cells identifying stem cells; or
ii) identifying stem cells and from among the identified stem cells identifying cells infected with virus, whereby the presence of cancer stem cells is indicative of the presence of an aggressive cancer.

62. The method of claim 61, wherein stem cells are identified based on expression of aldehyde dehydrogenase (ALDH1).

63. An antibody that specifically binds to the extracellular domain of NIS that is expressed in cell, wherein the NIS protein is encoded by an oncolytic virus that has infected the cells that express the NIS protein.

64. An isolated polypeptide, comprising the sequence NDSSRAPSSGMDAS (SEQ ID NO: 53), wherein the polypeptide does not comprise the complete extracellular domain of NIS.

65. An antibody that specifically binds to the polypeptide of claim 65, and also binds to an epitope on the extracellular domain of NIS when expressed on the surface of a cell.

66. An antibody of claim 64 that binds an epitope within a region corresponding to amino acids 502-515 of the NIS polypeptide of SEQ ID NO:46.

The application's sequence listing, which the Patent Office published only in electronic form, follows.

SEQUENCE LISTING (56 sequences)

SEQ ID NO: 1 - DNA, 203057 bp, Artificial Sequence
  GLV-1h68 genome
ttatgagaccatcaaagagagaaagagaataaaaatatttttgtaaaactttttttatgagaccatcaaagagagaaagagaataaaaatatttttgtaaaacttttttatgagaccatcaaagagagaaagagaataaaaatatttttgtaaaacttttttatgagaccatcaaagagagaaagagaataaaaatatttttgtaaaactttttttatgagaccatcaaagagagaaagagaataaaaatatttttgtaaaactttttttatgagaccatcaaagagagaaagagaataaaaatatttttgtaaaactttttttatgagaccatcaaagagagaaagagaataaaaatatttttgtaaaactttttttatgagaccatcaaagagagaaagagaataaaaatatttttgtaaaactttttttatgagaccatcaaagagagaaagagaataaaaatatttttgtaaaactttttttatgagaccatcaaagagagaaagagaataaaaatatttttgtaaaactttttttatgagaccatcaaagagagaaagagaataaaaatatttttgtaaaactttttttatgagaccatcaaagagagaaagagaataaaaatatttttgtaaaactttttttatgagaccatcaaagagagaaagagaataaaaatatttttgtaaaactttttttatgagaccatcaaagagagaaagagaataaaaatatttttgtaaaactttttttatgagaccatcaaagagagaaagagaataaaaatatttttgtaaaactttttttatgagaccatcagaaagaggtttaatatttttgtgatactctgaaaggaaataggaataggaataggaatagtgtcataatcgtatcacactattgagacagaaaaagaagaagtcgcgagaggtaactttttgtgaatgtagttaagaacatttttgttttgcaaaccggaatatagtgtccggtacacttttttaattcgtggtgtgcctgaatcgttcgattaaccctactcatccaatttcagatgaatagagttatcgattcagacacacgctttgagttttgttgaatcgatgagtgaagtatcatcggttgcaccttcagatgccgatccgtcgacatacttgaatccatccttgacctcaagttcagatgattccttgcacatgtctccgatacgaacgctaaactctagattcttgacgcattttgtatcgacgatcgttgaaccgatgatatcttcgtaactcactttcttatgagagatgttagacccgagtactggatgggtcttgatgtcgctgtctttctcttcttcgctacatctgatgtcgatagacacttcacagtctttgatcatagcaagagcttcttcatgagtgatcgcgggagagtccttaccttgtcctggggacacgctggacaatctagcattcactgtgtttccatcagcggattctgagatggatttaatctgaggacatttggtgaatccaaagttcattctcagacctccaccgatgatggagtaataagtggtaggaggatctacatcctcgactgatgtggaatcatcttctgattccacctcgggatctggatctgactcggactctgtaatttccgttacggattggcaaatcttatcattggtcggtgtttggtcttgctttgtgactttgataataacatcgattcccatatgatgtttgttttcttcttccgtacacgaggaggaggatgaggatgattgctgaagactggcaggcatagcagctgccgccaggcacatgcatgccaggacgatatattgtttcataattgctattgattgagtactgttctttatgattctacttccttaccgtgcaataaattagaatatattttctacttttacgagaaattaattattgtatttattatttatgggtgaaaaacttactataaaaagtgggtgggtttggaattagtgatcagtttatgtatatcgcaactaccgggcatatggctatcgacatcgagaacattacccacatgataagagattgtatcagtttcgtagtcttgagtattggtattactatatagtatatagatgtcgcccactagagttactgtctccgaatgcggcatgatagtatcattctttgctttcgttaactgtttggaggaagaatctttgttattgcatttaatctcgaaattcagagtgcacacctttctcctgtaaagaaacctgaagtcgctaccttattaagaacggagaagtatccatcacgaaatacgggattacagtctttatgattcatagtaatagttagttccgacgttgagatggattcgctgagaccggtagtggtcgtccgagtacacgacgtgtcgttaactggatacaggttaatttccacatcgatatagttaaacgtatttctgggtacgggttcgcatttatctgcggaagagacggtgtgagaatatgttccgagaccacacggagaacagatgacgtctccggatactccgtatcctattccacattttgtttgggaaacacatgccttgcatccggatgatcctttgagaagacaataatatccgggagagcattcacagattctattgtgagtcgtgttacacgatcgcgtcttccgttacaacttagacaagcgggtaaatgattattgcgagatgtgaaggtacccgaaccacacggcgtacatcgtgtgttagtcttgctatcgcataatctggaagcgtatgttcccggacacaaattatggcgtttgtattcgttgtctttacactttccatcggatggtgcatgcggtgctatatctcttccgtttattattatacatgagagaaacaatatatacgagtataatacggacttcatgatttaataatgtagtaatcgttgtcttgttcctgtttcctacttctccaatcatatagatattttctttctatcatggataatatttgtaatggttctttccgtacaacatactgtttagatgatattgcgcataatttccggaggcaaatacgatagtctagattgaccgatggtagactctaatttattgagtgctttgtcgacgagtttacttttacgctccatcgatagatggcactgttctatgagatcgtcgtacatgggaaatgaaatgtgactgtctgaatgtatggctttaagatagctgtgataccgtatacaggtcggtgtcggagattcgaatctctttgaggcgacttatgtcacgatgatggaatctatcttatcgaatgatatatttttcataaatacacttttatagtcctcgtttaaacagaatttactatgtagttccgcgaatgactcgtcccttaataggcagtaggctagtatcttttttacgtagtaatcgtcgtagggagagacatcttgtagaacaacgatttcgttttgttttctcttctgtaactgcttttctggatggccgtattgattatcgagcgtgatactcgctccatattccaataaccgctttgcaaattgtatattattgacatcgaccgcgtaatatagtagagttatcgatcatatctatatcatccatgtacttgcttagtatatcaaatacatctatcagtatggtttcataacagtgatacccgcaattattaaatctcgataatatcagaccgtacatacatagacggccattgttcgatacgtgatttacagccgcgtgtccatattttccacgataaaccttacgacgtttacatcgacgagattattattaacaaagtagtcgtgtagaggatagttgttgtccgttatctaacatgcatcgaacgaccatatcgccgtaatgtaagtagtttatcagtatggcttgtacgatggattcatcctgttgtctaaatctctttagaatgttatcgatgatgtagtggttatattctctggaatcgtacgaagtaatactacgcattacgtcgacaagagtatgacgtctctcaataagaagattaacgatttccatgtctacattatatggggttactctaaatcgcttgtttagataatacgcctctaatatagggctgacgtcgtatactctacacgtgtccacatcctttattaataataatttaacaatctctatatctatggttgagaaagaccagtagtattggatgggtaaagatcctccttcgtctctgccatggatggaaacattgttatcgatcaaacatttaattacatccttggatagagattgagattctctatgagacgatatatagtaatgaagagagttcttacacatatcactgtcgtacatacaggtacgaaatacgtaaccggtgctgtaacattctgatttaagaagccatagcaatacttctggtctcggattaggcgtcgttacgtatatatccaccaatccgagaccattgattgcataattcgtattcttggacggacgtatccgtttatccacaattaggtattttagcagacgtaagtcgatattatccgaatacagatcgaaatcatttatattcgacttgagttcgttagaggaatttgaatagctggatatcagtagatgcacaatctgagattttacgtatctatgcttactgtatactcctagcggagttaatccttcgttgtttctacaaagtctctcgactccgcgagagaacaatcttaatgtctgtatcgcatttattggagacgtaacaatgtagcgcattgtttcctcgtctatctatatgttttgataagttgtgacacgtttcaatttctagttttatttttttgtacgtcacatcttcatccagtagacgacatagaatagtgcactctctaccacaataatccatagctattctggtgctaattattcctatttcacgaaggcaatcattcctcataagatgataaaaagtgtagtggagatttagtatttagcagtgcggatatgatccaagagggtgagatagtcgttctcgttcagaatctttcgcagcataagtagtatgtcgatatacttatcgttgaagactctttataaaagtctatttgtttatatttattgcggatagcagtatttccctataaaaagtatacgtcctgtggtgtctttaatcatgtacatgaatggatggtttatgtagaccttcgtacgatataccatcgaaaagttaatcgtaaatactcctgtaacggccgatgcttctgtatactcctcattaacatctataaacgtcgtatgtagaaatttttctacagtgatagtttcattacacatcttgctaaaatctgcataatatccgaatatattagtaagtcctaaattttctaaaatcggtaccagattatacggttctgtcatttccactttaaactttggcatatacaagtctatacttttagtagataacataccacaccattttttaaatttttcatctgttatatttttttctatgttatatataccttctatgtcgtccggtagtataattaccatactagagtttccctcgtatggaatatcgataatagagaatcctccgaataattcattaatatgtacatattgcaagttattctcggtacccaccatcatatcaacgctggtaactatattcttagaaatataaaacttgtctgtatatgtaagatgtttagaaaatggatatttccacattgctttaaaatggacggcgctaacaactgtcatacgagtattaatggatagcggactagtcaataaggaattaattttaccatttgtcattgtcttaacccattcgttgattagttcctttgtttggttagcattattaaagtttacagtttgaaaatcgtcttttattttttgtaggaaggaggcgtggaactcgatactatcgctaccgtatattttatttgcggtagctagtgtcgcacaatacggaatatctacctccatgtcatcattattgtcatcgggtgtattctcattcatattctctatatattttgatagttgttcagctgtagaaccagctgctccatgatttagaatagataaagtagataaaatggaaactggagaaatcaaaacattttcatcagggtgttttaagattagttctttaaagatatccatggtatagacctaacgataacgatatatatcataaataaataatgttaaatttcaatttatgtttgtaccccgtattcatacttaacaaattggtattgcgtacacaatcaatcatattacataccattaataatgcaagcataaaaaattgttagtagatgtttctaaatataggttccgtaagcaaagaatataagaatgaagcggtaatgataaaatcaatcgttatctaaaatgatcatactcatttattttattctattatattaacacatacatttttaacagcaacacattcaatattgtattgttatttttatattatttacacaattaacaatatattattagtttatattactgaattaataatataaaattcccaatcttgtcataaacacacactgagaaacagcataaacacagaatccatcaaaaatgttgataaattatctgatgttgttgttcgctgctatgataatcagatcattcgccgatagtggtaacgctatcgaaacgacattgccagaaattacaaacgctacaacagatattccagctatcagattatgcggtccagagggagatggatattgtttacacggtgactgtatccacgctagagatattgacggtatgtattgtagatgctctcatggttatacaggcattagatgtcagcatgtagtattagtagactatcaacgttcagaaaacccaaacactacaacgtcatatatcccatctcccggtattatgcttgtattagtaggcattattatgtgttgtctattatctgtttataggttcactcgacgaactaaactacctatacaagatatggttgtgccataatttttataaatttttttatgagtatttttacaaaaatgtataaagtgtatgtcttatgtatatttataaaaatgctaagtatgcgatgtatctatgttatttgtatttatctaaacaatacctctacctctagatattatacaaaaattttttatttcggcatattaaagtaaaatctagttaccttgaaaatgaatacagtgggtggttccgtatcaccagtaagaacataatagtcaaatacagtatccgattgagattttgcatacaatactagtctagaaagaaatttgtaatcatcttctgtgacgggagtccatatatctgtatcatcgtctagtttatcagtgtcccatgctatattcctgttatcatcattagttaatgaaaataactctcgtgcttcagaaaagtcaaatattgtatccatacatacatctccaaaactatcgcttatacgtttatctttaacgatacctatacctagatggttatttactaacagacattttccagatctattgactataactcctatagtttccacatcaaccaagtaatgatcatctattgttatataacaataacataactcttttccatttttatcagtatgtatatctatatcaacgtcgtcgttgtagtgaatagtagtcattgatctattatatgaaacggatatgtctagaacggcaattgttttacgtccagttaacactttcgttgatttaaagtctagagtctttgcaaacataatatccttatccgactttatatttcctgtagggtggtataattttattttgcctccacatatcggtgtttccaaatatattactagacaatattccatatagttattagttaagggtacccaattagaacacgtacgcttattatcatcatttggatcgtatttcataaaagttattgtgttatcgatgtcaacacattctacattttttaatcgtctatatagtatttttctgatattttctataatatcagaattgtcttccatcggaagttgtatactatcggaatcagttacatgtttaaataattctctgatgtcattccttatacaatcaaattcattattaaacagtttaatagtctgtagacctttatcgtcgtaaatatccattgtcttattagttacgcttatttttatgtgtttttacgttgctttattatattttataagaatgattgtttgacgaatcacgagaactattaagacacattattaggtatatattataaaaaagtttttgattacgatgttataagaggaaagaggacacattaacatcatacatcaattaactacattcttataacatcgtaatcaaaagaattgcaattttgatgtataacaactgtcaatgggttatggaattgtatattacatattatacggtatgttggtaacgacaaataccggtcggtaattgtctgccggtgtaatagaattatatatatctatctattacaccggccttgtatacataataataagttgtggtagtatgatctccatatttataatttaggactttgtattcagtatttttggaatcataaaaaataaaaaaaagttttactaatttaaaatttaaaaagtatttacatttttttcactgtttagtcgcggatatggaattcgatcctgccaaaatcaatacatcatctatagatcatgtaacaatattacaatacatagatgaaccaaatgatataagactaacagtatgcattatccgaaatattatatcaatatcacaaaaataaatacacatttggctaatcaatttcgggcttggaaaaaacgtatcgccggaagggactatatgactaacttatctagagatacaggaatacaacaatcaaaacttactgaaactatacgtaactgtcaaaaaaatagaaacatatatggtctatatatacactacaatttagttattaattggataaccgatgtgattatcaatcaatattaagagggttggtaaattggtacatagctaataatacctatactccaaatacacccaataatacaacaaccatttctgagttggatatcatcaaaatactaaataaatacgaggacgtgtatagagtaagtaaagaaaaagaatgtggaatttgctatgaagttgtttactcaaaacgatagatactttggtttattggattcgtgtactcatatattttgcataacatgcatcaatatatggcatagaacacgaagagaaaccggtgcgtcggataattgtcctatatgccgtacccgttttagaaacataacaatgagcaagttctataagctagttaactaataaataaaaagtttaatttgttgacgacgtatgtcgttattttttctcgtataaaagattaatttgattctaatataatctttagtattggataaatatcaattcaaattaattccattagattatatcataaataaaaatagtagcacacaactacttcagcaaacattctttttataaatgccatctagcgtagcgaggacacaagtgaacctataattatcaaatttattagtatcagtcacatgaaggactttacgtagagtgacgattccactatctgtggtacgaacggtttcatcttctttgatgccatcacccagatgttctataaacttggtatcctcgtccgatttcatatcctttgccaaccaatacatatagctaaactcaggcatatgttccacacatcctgaacaatgaaattctccagaagatgttacaatgtctagatttggacatttggtttcaaccgcgttaacatatgagtgaacacacccatacatgaaagcgatgagaaataggattctcatcttgccaaaatatcactagaaaaaatttatttatcagttttaaaggtataaaaaatacttattgttgctcgaatattttgtatttgatggtatacggaagattagaaatgtaggtattatcatcaactgattctatggttttatgtattctatcatgtttcactattgcgttggaaataatatcatatgcttccacatatattttattttgttttaactcataatactcacgtaattctggattattggcatatctatgaataattttagctccatgatcagtaaatattaatgagaacatagtattaccacctaccattatttttttcatctcattcaattcttaattgcaaagatctatataatcattatagcgttgacttatggactctggaatcttagacgatgtacagtcatctataatcatggcatatttaatacattgttttatagcatagtcgttatctacgatgttagatatttctctcaatgaatcaatcacacaatctaatgtaggtttatgacataatagcattttcagcagttcaatgtttttagattcgttgatggcaatggctatacatgtatatccgttatttgatctaatgttgacatctgaaccggattctagcagtaaagatactagagattgtttattatatctaacagccttgtgaagaagtgtttctcctcgtttgtcaatcatgttaatgtctttaagataaggtaggcaaatgtttatagtactaagaattgggcaagcataagacatgtcacaaagacccttttttgtatgtataagtgtaaaaattataacatccatagttggatttacataggtgtccaatcgggatctctccatcatcgagataattgatggcatctcccttccttttttagtagatatttcatcgtgtaagaatcaatattaatatttctaaagtatccgtgtatagcctctttatttaccacagctccatattccactagagggatatcgccgaatgtcatatactcaattagtatatgttggaggacatccgagttcattgttttcaatatcaaagagatggtttccttatcatttctccatagtggtacaatactacacattattccgtgcggctttccattttccaaaaacaatttgaccaaatctaaatctacatctttattgtatctataatcactatttagataatcagccataattcctcgagtgcaacatgttagatcgtctatatatgaataagcagtgttatctattcctttcattaacaatttaacgatgtctatatctatatgagatgacttaatataatattgaagagctgtacaatagtttttatctataaaagacggcttgattccgtgattaattagacatttaacaacttccggacgcacatatgctctcgtatccgactctgaatacagatgagagatgatatacagatgcaatacggtaccgcaatttcgtagttgataatcatcatacgcgtatcagtactcgtcctcataaagaacactgcagccattttctatgaacaaatcaataattttagaaacaggatcattgtcattacataattttctataactgaacgatggttttcacatttaacactcaagtcaaatccatgttctaccaacacctttatcaagtcaacgtctacatttttggatttcatatagctgaatatattaaagttatttatgttgctaaatccagtggcttctagtagagccatcgctatatccttattaactttaacatgtctactatttgtgtattcttctaatggggtaagctgtctccaatttttgcgtaatggattagtgccactgtctagtagtagtttgacgacctcgacattattacaatgctcattaaaaaggtatgcgtgtaaagcattattcttgaattggttcctggtatcattaggatctctgtctttcaacatctgtttaagttcatcaagagccacctcctcattttccaaatagtcaaacattttgactgaatgagctactgtgaactctatacacccacacaactaatgtcattaaatatcatgtcaaaaacttgtacaattattaataaaaataatttagtgtttaaattttaccagttccagattttacacctccgttaatacctccattaaccccactggacgatcctcctccccacattccaccgccaccagatgtataagttttagatcctttattactaccatcatgtccatggataaagacactccacatgccgccactaccccctttagaagacatattaataagacttaaggacaagtttaacaataaaattaatcacgagtaccctactaccaacctacactattatatgattatagtttctatttttacagtaccttgactaaagtttctagtcacaagagcaatactaccaacctacactattatatgattatagtttctatttttataggaacgcgtacgagaaaatcaaatgtctaatttctaacggtagtgttgataaacgattgttatccgcggatacctcctctatcatgtcgtctattttcttactttgttctattaacttattagcattatatattatttgattataaaacttatattgcttattagcccaatctgtaaatatcggattattaacatatcgtttctttgtaggtttatttaacatgtacatcactgtaagcatgtccttaccatttattttaatttgacgcatatccgcaatttctttttcgcagtcggttataaattctatatatgatggatacatgctacatgtgtacttataatcgactaatatgaagtacttgatacatattttcagtaacgatttattattaccacctatgaataagtacctgtgatcgtctaggtaatcaactgttttcttaatacattcgatggttggtaatttactcagaataatttccaatatcttaatatataattctgctatttctgggatatatttatctgccagtataacacaaatagtaatacatgtaaacccatattttgttattatattaatgtctgcgccattatctattaaccattctactaggctgacactatgcgactcaatacaatgataaagtatactacatccatgtttatctattttgtttatatcatcaatatacggcttacaaagttttagtatcgataacacatccaactcacgcatagagaaggtagggaataatggcataatatttattaggttatcatcattgtcattatctacaactaagtttccattttttaaaatatactcgacaactttaggatctctattgccaaatttttgaaaatatttatttatatgcttaaatctatataatgtagctccttcatcaatcatacatttaataacattgatgtatactgtatgataagatacatattctaacaatagatcttgtatagaatctgtatatcttttaagaattgtggatattaggatattattacataaactattacacaattctaaaatataaaacgtatcacggtcgaataatagttgatcaactatataattatcgattttgtgatttttcttcctaaactgtttacgtaaatagttagatagaatattcattagttcatgaccactatagttactatcgaataacgcgtcaaatatttcccgtttaatatcgcatttgtcaagataataatagagtgtggtatgttcacgataagtataataacgcatctctttttcgtgtgaaattaaatagtttattacgtccaaagatgtagcataaccatcttgtgacctagtaataatataataatagagaactgttttacccattctatcatcataatcagtggtgtagtcgtaatcgtaatcgtctaattcatcatcccaattataatattcaccagcacgtctaatctgttctattttgatcttgtatccatactgtatgttgctacatgtaggtattcctttatccaataatagtttaaacacatctacattgggatttgatgttgtagcgtatttttctacaatattaataccatttttgatactatttatttctatacctttcgaaattagtaatttcaataagtctatattgatgttatcagaacatagatattcgaatatatcaaaatcattgatatttttatagtcgactgacgacaataacaaaatcacaacatcgtttttgatattattatttttcttggtaacgtatgcctttaatggagtttcaccatcatactcatataatggatttgcaccactttctatcaatgattgtgcactgctggcatcgatgttaaatgttttacaactatcatagagtatcttatcgttaaccatgattggttgttgatgctatcgcattttttggtttctttcatttcagttatgtatggatttagcacgtttgggaagcatgagctcatatgatttcagtactgtagtgtcagtactattagtttcaataagatcaatctctagatctatagaatcaaaacacgataggtcagaagataatgaatatctgtaggcttcttgttgtactgtaacttctggttttgttagatggttgcatcgtgctttaacgtcaatggtacaaattttatcctcgctttgtgtatcatattcgtccctactataaaattgtatattcagattatcatgcgatgtgtatacgctaacggtatcaataaacggagcacaccatttagtcataaccgtaatccaaaaatttttaaagtatatcttaacgaaagaagttgtgtcattgtctacggtgtatggtactagatcctcataagtgtatatatctagagtaatgtttaatttattaaatggttgataatatggatcctcgtgacaatttccgaagatggaaataagacataaacacgcaataaatctaattgcggacatggttactccttaaaaaaatacgaataatcaccttggctatttagtaagtgtcatttaacactatactcatattaatccatggactcataatctctatacgggattaacggatgttctatatacggggatgagtagttctcttctttaactttatactttttactaatcatatttagactgatgtatgggtaatagtgtttgaagagctcgttctcatcatcagaataaatcaatatctctgtttttttgttatacagatgtattacagcctcatatattacgtaatagaacgtgtcatctaccttattaactttcaccgcatagttgtttgcaaatacggttaatcctttgacctcgtcgatttccgaccaatctgggcgtataatgaatctaaactttaattgcttgtaatcattcgaaataatttttagtttgcatccgtagttatcccctttatgtaactgtaaatttctcaacgcgatatctccattaataatgatgtcgaattcgtgctgtatacccatactgaatggatgaacgaataccgacggcgttaatagtaatttactttttcatctttacatattgggtactagttttactatcataagtttataaattccacaagctactatggaataagccaaccatcttagtataccacacatgtcttaaagtttattaattaattacatgttgttttatatatatcgctacgaatttaaagagaaattagtttaggaagaaaaattatctatctacatcatcacgtctctgtattctacgatagagtgctactttaagatgcgacagatccgtgtcatcaaatatatactccattaaaatgattattccggcagcgaacttgatattggatatatcacaacctttgttaatatctacgacaatagacagcagtcccatggttccataaacagtgagtttatctttctttgaagagatattttgtagagatcttataaaactgtcgaatgacatcgcatttatatctttagctaaatcgtatatgttaccatcgtaatatctaaccgcgtctatcttaaacgtttccatcgctttaaagacgtttccgatagatggtctcatttcatcagtcatactgagccaacaaatataatcgtgtataacatctttgatagaatcagactctaaagaaaacgaatcggctttattatacgcattcatgataaacttaatgaaaaatgtttttcgttgtttaagttggatgaatagtatgtcttaataattgttattatttcattaattaatatttagtaacgagtacactctataaaaacgagaatgacataactaatcataactagttatcaaagtgtctaggacgcgtaattttcatatggtatagatcctgtaagcattgtctgtattctggagctattttctctatcgcattagtgagttcagaatatgttataaatttaaatcgaataacgaacataactttagtaaagtcgtctatattaactcttttattttctagccatcgtaataccatgtttaagatagtatattctctagttactacgatctcatcgttgtctagaatatcacatactgaatctacatccaattttagaaattggtctgtgttacatatctcttctatattattgttgatgtattgtcgtagaaaactattacgtagaccattttctttataaaacgaatatatagtactccaattatctttaccgatatatttgcacacataatccattctctcaatcactacatctttaagattttcgttgttaagatatttggctaaactatataattctattagatcatcaacagaatcagtatatatttttctagatccaaagacgaactctttggcgtcctctataatattcccagaaaagatattttcgtgttttagtttatcgagatctgatctgttcatatacgccatgattgtacggtacgttatgataaccgcataaaataaaaatccattttcatttttaaccaatactattcataattgagattgatgtaatactttgttactttgaacgtaaagacagtacacggatccgtatctccaacaagcacgtagtaatcaaatttggtgttgttaaacttcgcaatattcatcaatttagatagaaacttatactcatcatctgttttaggaatccatgtattattaccactttccaacttatcattatcccaggctatgtttcgtccatcatcgttgcgcagagtgaataattcttttgtattcggtagttcaaatatatgatccatgcatagatcggcaaagctattgtagatgtgatttttcctaaatctaatataaaactcgtttactagcaaacactttcctgatttatcgaccaagacacatatggtttctaaatctatcaagtggtggggatccatagttatgacgcagtaacatatattattacattcttgactgtcgctaatatctaaatatttattgttatcgtattggattctgcatatagatggcttgtatgtcaaagatatagaacacataaccaatttatagtcgcgctttacattctcgaatctaaagttaagagatttagaaaacattatatcctcggatgatgttatcactgtttctggagtaggatatattaaagtctttacagatttcgtccgattcaaataaatcactaaataatatcccacattatcatctgttagagtagtatcattaaatctattatattttatgaaagatatatcactgctcacctctatatttcgtacatttttaaactgtttgtataatatctctctgatacaatcagatatatctattgtgtcggtagacgataccgttacatttgaattaatggtgttccattttacaacttttaacaagttgaccaattcatttctaatagtatcaaactctccatgattaaatattttaatagtatccattttatatcactacggacacaaagtagctgacataaaccattgtataatttttatgttttatgtttattagcgtacacattttggaagttccggcttccatgtatttcctggagagcaagtagatgatgaggaaccagatagtttatatccgtacttgcacttaaagtctacattgtcgttgtatgagtatgatcttttaaacccgctagacaagtatccgtttgatattgtaggatgtggacatttaacaatctgacacgtgggtggatcggaccattctcctcctgaacacaggacactagagttaccaatcaacgaatatccactattgcaactataagttacaacgctcccatcggtataaaaatcctcgtatccgttatgtcttccgttggatatagatggaggggattggcatttaacagattcacaaataggtgcctcgggattccataccatagatccagtagatcctaattcacaatacgatttagattcaccgatcaactgatatccgctattacaagagtacgttatactagagccaaagtctactccaccaatatcaagttggccattatcgatatctcgaggcgatgggcatctccgtttaatacattgattaaagagtgtccatccagtacctgtacatttagcatatataggtcccattttttgctttctgtatccaggtagacatagatattctatagtgtctcctatgttgtaattagcattagcatcagtctccacactattcttaaatttcatattaatgggtcgtgacggaatagtacagcatgatagaacgcatcctattcccaacaatgtcaggaacgtcacgctctccaccttcatatttatttatccgtaaaaatgttatcctggacatcgtacaaataataaaaagcccatatatgttcgctattgtagaaattgtttttcacagttgctcaaaaacgatggcagtgacttatgagttacgttacactttggagtctcatctttagtaaacatatcataatattcgatattacgagttgacatatcgaacaaattccaagtatttgattttggataatattcgtattttgcatctgctataattaagatataatcaccgcaagaacacacgaacatctttcctacatggttaaagtacatgtacaattctatccatttgtcttccttaactatatatttgtatagataattacgagtctcgtgagtaattccagtaattacatagatgtcgccgtcgtactctacagcataaactatactatgatgtctaggcatgggagacttttttatccaacgatttttagtgaaacattccacatcgtttaatactacatatttctcatacgtggtataaactccacccattacatatatatcatcgtttacgaataccgacgcgcctgaatatctaggagtaattaagtttggaagtcttatccatttcgaagtgccgtgtttcaaatattctgccacacccgttgaaatagaaaattctaatcctcctattacatataactttccatcgttaacacaagtactaacttctgattttaacgacgacatattagtaaccgttttccattttttcgttttaagatctacccgcgatacggaataaacatgtctattgttaatcatgccgccaataatgtatagacaattatgtaaaacatttgcattatagaattgtctatctgtattaccgactatcgtccaatattctgttctaggagagtaatgggttattgtggatatataatcagagtttttaatgactactatattatgttttataccatttcgtgtcactggctttgtagatttggatatagttaatcccaacaatgatatagcattgcgcatagtattagtcataaacttgggatgtaaaatgttgatgatatctacatcgtttggatttttatgtatccactttaataatatcatagctgtaacatcctcatgatttacgttaacgtcttcgtgggataagatagttgtcagttcatcctttgataattttccaaattctggatcggatgtcaccgcagtaatattgttgattatttctgacatcgacgcattatatagttttttaattccatatcttttagaaaagttaaacatccttatacaatttgtgaaattaatattatgaatcatagtttttacacatagatctactacaggcggaacatcaattattatggcagcaactagtatcatttctacattgtttatggtgatgtttatcttcttccagcgcatatagtctaatagcgattcaaacgcgtgatagtttataccattcaatataatcgcttcatcctttagatggtgatcctgaatgcgtttaaaaaaattatacggagacgccgtaataatttccttattcacttgtataatttccccattgatagaaaatattacgctttccattcttaaagtactataagtaattatagtataatgtaaacgtttatatattcaatatttttataaaaatcattttgacattaattcctttttaaatttccgtctatcatctatagaaacgtattctatgaatttataaaatgcttttacgtgtcctatcgtaggcgatagaaccgctaaaaagcctatcgaatttctacaaaagaatctgttatatggtatagggagagtataaaacattaaatgtccgtacttattaaagtattcagtagccaatcctaactctttcgaatacttattaatggctcttgttctgtacgaatctatttttttgaacaacggacctagtggtatatcttgttctatgtatctaaaataatgtctgactagatccgttagtttaatatccgcagtcatcttgtctagaatggcaaatctaactgcgggtttaggctttagtttagtttctatatctacatctatgtctttatctaacaccaaaaatataatagctaatattttattacaatcatccggatattcttctacgatctcactaactaatgtttctttggttatactagtatagtcactatcggacaaataaagaaaatcagatgatcgatgaataatacatttaaattcatcatctgtaagatttttgagatgtctcattagaatattattagggttagtactcattatcattcggcagctattacttattttattatttttcaccatatagatcaatcattagatcatcaaaatatgtttcaatcatcctaaagagtatggtgaatgactcttcccatctaatttctgaacgttcaccaatgtctctagccactttggcactaatagcgatcattcgcttagcgtcttctatattattaactggttgatttaatctatctagcaatggaccgtcggacagcgtcattctcatgttcttaatcaatgtacatacatcgccgtcatctaccaattcatccaacaacataagctttttaaaatcatcattataataggtttgatcgttgtcatttctccaaagaatatatctaataagtagagtcctcatgcttagttaacaactattttttatgttaaatcaattagtacaccgctatgtttaatacttattcatattttagtttttaggattgagaatcaatacaaaaattaatgcatcattaattttagaaatacttagtttccacgtagtcaatgaaacatttgaactcatcgtacaggacgttctcgtacaggacgtaactataaaccggtttatatttgttcaagatagatacaaatccgataactttttttacgaattctacgggatccactttaaaagtgtcataccgggttctttttatttttttaaacagatcaatggtgtgatgttgattaggtcttttacgaatttgatatagaatagcgtttacatattctccataatggtcaatcgccatttgttcgtatgtcataaattctttaattatatgacactgtgtattatttagttcatccttgttcattgttaggaatctatccaaaatggcaattatactagaactataggtgcgttgtatacacatattgatgtgtctgtttatacaatccatgatatttggatccatgctactaccttcgggtaaaattgtagcatcatataccatttctagtactttaggttcattattatccattgcagaggacgtcatgatcgaatcataaaaaaatatattatttttatgttattttgttaaaaataatcatcgaatacttcgtaagatactccttcatgaacataatcagttacaaaacgtttatatgaagtaaagtatctacgatttttacaaaagtccggatgcataagtacaaagtacgcgataaacggaataataatagatttatctagtctatctttttctatagctttcatagttagatacatggtctcagaagtaggattatgtaacatcagcttcgataaaatgactgggttatttagtcttacacattcgctcatacatgtatgaccgttaactacagagtctacactaaaatgattgaacaatagatagtctaccattgtttcgtattcagatagtacagcgtagtacatggcatcttcacaaattatatcattgtctaatagatatttgacgcatcttatggatcccacttcaacagccatcttaaaatcatattgctttcctttatcattaataatttctagaacatcatctctatcataaaagatacaaatattaactgtttgatccgtaataacattgctagtcaatagcaatttgttaataagatgcgctgggctcaatgtcttaataagaagtgtaagaggactatctccgaatttgttttgtttattaacatccgttgatggaagtaaaagatctataatgtctacattcttgactgttttagagcatacaatatggagaggtgtatttccatcatgatctggttttgagggactaattcctagtttcatcatccatgagattgtagaagcttttggattgtctgacataagatgtctatgaatatgatttttgccaaatttatccactatcctggcttcgaatccgatggacattatttttttaaacactctttctgaaggatctgtacacgccaacaacggaccacatccttcttcatcaaccgagttgttaatcttggctccatactgtaccaataaatttattctctctatgacttcatcatctgttcccgagagataatatagaggtgttttatgctgtttatcacacgcgtttggatctgcgccgtgcgtcagcagcatcgcgactattctattattattaattttagaagctatatgcaatggataatttccatcatcatccgtctcatttggagagtatcctctatgaagaagttcttcgacaaatcgttcatctagtcctttaattccacaatacgcatgtagaatgtgataattatttccagaaggttcgatagcttgtagcatattcctaaatacatctaaatttttactattatatttggcataaagagatagataatactcggccgacataatgttgtccattgtagtataaaaattaatatttctatttctatttctgtatatttgcaacaatttactctctataacaaatatcataacttagtttttttatgtcaagaaggcactggtttagttcatctataaatgtcacgccataactaccacgcatgccatactcagaattatgataaagatatttatccttggggtgtaggtaatggggattaatctttgttggatcagtctctaagttaacacatgtcacacatgatccatttatagttatatcacacgatgatgatttatgaattgattccggaagatcgctatcgtattttgtggttccacaattcatttccatacatgttattgtcacactaatattatgatgaactttatctagccgctgagtggtaaacaacagaacagatagtttattatctttaccaacaccctcagccgctgccacaaatctctgatccgtatccatgatggtcatgtttatttctagtccgtatccagtcaacactatgttagcatttctgtcgatatagctttcactcatatgacactcaccaataatagtagaattaatgtcgtaatttacaccaatagtgagttcggcggcaaagtaccaataccggtaatcttgtcgaggaggacatatagtattcttgtattctaccgaatacccgagagatgcgatacaaaagagcaagactaatttgtaaaccatcttactcaaaatatgtaacaatagtacgatgcaatgagtaagacaataggaaatctatcttatatacacataattattctatcaattttaccaattagttagtgtaatgttaacaaaaatgtgggagaatctaattagtttttctttacacaattgacgtacatgagtctgagttccttgtttttgctaattatttcatccaatttattattcttgacgatatcgagatcttttgtataggagtcaaacttgtattcaacatgcttttctataatcattttagctatttcggcatcatccaatagtacattttccagattagcagaatagatattaatgtcgtatttgaacagagcctgtaacatctcaatgtctttattatctatagccaatttaatgtccggaatgaagagaagggaattattggtgtttgtcgacgtcatatagtcgagcaagagaatcatcatatccacgtgtccattttttatagtgatgtgaatacaactaaggagaatagccagatcaaaagtagatggtatctctgaaagaaagtaggaaacaatacttacatcattaagcatgacggcatgataaaatgaagttttccatccagttttcccatagaacatcagtctccaatttttcttaacaaacagttttaccgtttgcatgttaccactatcaaccgcataatacaatgcggtgtttcccttgtcatcaaattgtgaatcatccagtccactgaatagcaaaatctttactattttggtatcttccaatgtggctgcctgatgtaatggaaattcattctctagaagatttttcaatgctccagcgttcaacaacgtacatactagacgcacgttattatcagctattgcataatacaaggcactatgtccatggacatccgccttaaatgtatctttactagagagaaagcttttcagctgcttagacttccaagtattaattcgtgacagatccatgtctgaaacgagacgctaattagtgtatattttttcattttttataattttgtcatattgcaccagaattaataatatctttaatagatctgattagtagatacatggctatcgcaaaacaacatatacacatttaataaaaataatatttattaagaaaattcagatttcacgtacccatcaatataaataaaataatgattccttacaccgtacccatattaaggagattccaccttacccataaacaatataaatccagtaatatcatgtctgatgatgaacacaaatggtgtattaaattccagtttttcaggagatgatctcgccgtagctaccataatagtagatgcctctgctacagttccttgttcgtcgacatctatctttgcattctgaaacattttataaatatataatgggtccctagtcatatgtttaaacgacgcattatctggattaaacatactaggagccatcatttcggctatcgacttaatatccctcttattttcgatagaaaatttagggagtttaagattgtacactttattccctaattgagacgaccaatagtctaattttgcagccgtgatagaatctgtgaaatgggtcatattatcacctattgccaggtacatactaatattagcatccttatacggaaggcgtaccatgtcatattctttgtcatcgattgtgattgtatttccttgcaatttagtaactacgttcatcatgggaaccgttttcgtaccgtacttattagtaaaactagcattgcgtgttttagtgatatcaaacggatattgccatatacctttaaaatatatagtattaatgattgcccatagagtattattgtcgagcatattagaatctactacattagacataccggatctacgttctactatagaattaattttattaaccgcatctcgtctaaagtttaatctatataggccgaatctatgatattgttgataatacgacggtttaatgcacacagtattatctacgaaactttgataagttagatcagtgtacgtatatttagatgttttcagcttagctaatcctgatattaattctgtaaatgctggacccagatctctttttctcaaatccatagtcttcaataattctattctagtattacctgatgcaggcaatagcgacataaacatagaaaacgaataaccaaacggtgagaagacaatattatcatcttgaatatttttatacgctactataccggcattggtaaatccttgtagacgataggcggacgctgaacacgctaacgatagtatcaataacgcaatcatgattttatggtattaataattaaccttatttttatgttcggtataaaaaaattattgatgtctacacatccttttgtaattgacatctatatatccttttgtataatcaactctaatcactttaacttttacagttttccctaccagtttatccctatattcaacatatctatccatatgcatcttaacactctctgccaagatagcttcagagtgaggatagtcaaaaagataaatatatagagcataatcattctcgtatactctgccctttattacatcacccgcattgggcaacgaataacaaaatgcaagcatcttgttaacgggctcgtaaattgggataaaaattatgtttttattgtcttatatctattttattcaagagaatattcaggaatttctttttccggttgtatctcgtcgcagtatatatcatttgtacattgtttcatattttttaatagtttacaccttttagtaggactagtatcgtacaattcatagctgtattttgaattccaatcacgcataaaaatatcttccaattgttgacgaagacctaatccatcatccggtgtaatattaatagatgctccacatgtatccgtaaagtaatttcctgtccaatttgaggtacctatataggccgttttatcggttaccatatatttggcatggtttaccctagaatacggaatgggaggatcagcatctggtacaataaatagctttacttctatatttatgtttttagattttagcatagcgatagatcttaaaaagtttctcatgataaacgaagatcgttgccagcaactaatcaatagcttaacggatacttgtctgtctatagcggatcttcttaattcatcttctatataaggccaaaacaaaattttacccgccttcgaataaataatagggataaagttcataacagatacataaacgaatttactcgcatttctaatacatgacaataaagcggttaaatcattggttctttccatagtacatagttgttgcggtgcagaagcaataaatacagagtgtggaacgccgcttacgttaatactaagaggatgatctgtattataatacgacggataaaagtttttccaattatatggtagattgttaactccaagataccagtatacctcaaaaatttgagtgagatccgctgccaagttcctattattgaagatcgcaatacccaattccttgacctgagttagtgatctccaatccatgttagcgcttcctaaataaatatgtgtattatcagatatccaaaattttgtatgaagaactcctcctaggatatttgtaatatctatgtatcgtacttcaactccggccatttgtagtctttcaacatcctttaatggtttgttagatttattaacggctactctaactcgtactcctcttttgggtaattgtacaatctcgtttaatattatcgtgccgaaattcgtacccacttcatccgataaactccaataaaaagatgatatatctagtgtttttgtggtattggatagaatttccctccacatgttaaatgtagacaaatatactttatcaaattgcatacctataggaatagtttctgtaatcactgcgattgtattatccggattcattttatttgttaaaagaataatcctatatcacttcactctattaaaaatccaagtttctatttctttcatgactgattttttaacttcatccgtttccttatgaagatgatgtttggcaccttcataaatttttatttctctattacaatttgcatgttgcatgaaataatatgcacctaaaacatcgctaatcttattgtttgttccctggagtatgagagtcggggggtgttaatcttggaaattatttttctaaccttgttggtagccttcaagacctgactagcaaatccagccttaattttttcatgattgactaatgggtcgtattggtatttataaactttatccatatctctagatactgattctggacatagctttccgactggcgcatttggtgtgatggttcccataagtttggcagctagcagattcagtcttgaaacagcatctgcattaactagaggagacattagaatcattgctgtaaacaagtttggattatcgtaagaggctagctcccatggaatgacccaataagtagatttaatagttaccacgtgctgtaccaaagtcatcaatcatcattttttcaccattacttcttccatgtccaatatgatcatgtgagaatactaaaattcctaacgatgatatgttttcagctagttcgtcataacgtccagaatgtttaccagctccatgacttatgaatactaatgccttaggatatgtaataggtttccaatatttacaatatatgtaatcattgtccagattgaacatacagtttgcactcatgattcacgttatataactatcaatattaacagttcgtttgatgatcatattatttttatgttttattgataattgtaaaaacatacaattaaatcaatatagaggaaggagacggctactgtcttttgtaagatagtcatggcgactaaattagattatgaggatgctgttttttactttgtggatgatgataaaatatgtagtcgcgactccatcatcgatctaatagatgaatatattacgtggagaaatcatgttatagtgtttaacaaagatattaccagttgtggaagactgtacaaggaattgatgaagttcgatgatgtcgctatacggtactatggtattgataaaattaatgagattgtcgaagctatgagcgaaggagaccactacatcaattttacaaaagtccatgatcaggaaagtttattcgctaccataggaatatgtgctaaaatcactgaacattggggatacaaaaagatttcagaatctagattccaatcattgggaaacattacagatttgatgaccgacgataatataaacatcttgatactttttctagaaaaaaaattgaattgatgatataggggtcttcataacgcataattattacgttagcattctatatccgtgttaaaaaaaattatcctatcatgtatttgagagttttatatgtagcaaacatgatagctgtgatgccaataagctttagatattcacgcgtgctagtgttagggatggtattatctggtggtgaaatgtccgttatataatctacaaaacaatcatcgcatatagtatgcgatagtagagtaaacatttttatagtttttactggattcatacatcgtctacccaattcggttataaatgaaattgtcgccaatcttacacccaaccccttgttatccattagcatagtattaacttcgttatttatgtcataaactgtaaatgattttgtagatgccatatcatacatgatattcatgtccctattataatcattactaactttatcacaatatatgttgataatatctatatatgatctagtctttgtgggcaactgtctatacaagtcgtctaaacgttgtttactcatatagtatcgaacagccatcattacatggtcccgttccgttgatagataatcgagtatgttagtggacttgtcaaatctatataccatattttctggaagtggatatacatagtcgtgatcaacattattgctagcctcatcttctatatcctgtactataccattatctatatcatctacataatctatgatattattacacataaacatcgacaacatactattgtttattatctaagtcctgttgatccaaacccttgatctcctctatttgtactatctagagattgtacttcttccagttctggataatatatacgttgatagattagctgagctattctatctccagtatttacattaaacgtacattttccattattaataagaatgactcctatgtttcccctataatcttcgtctattacaccacctcctatatcaatgccttttagtgacagaccagacctaggagctattctaccatagcagaacttaggcatggacatactaatatctgtcttaattaactgtctttctcctggagggatagtataatcgtaagcgctatacaaatcatatccggcagcacccggcgattgcctagtaggagatttagctctgttagtttccttaacaaatctaactggtgagttaatattcatgttgaacataaaactaatattttatttcaaaattatttaccatcccatatattccatgaataagtgtgatgattgtacacttctatagtatctatatacgatccacgataaaatcctcctatcaatagcagtttattatccactatgatcaattctggattatccctcggataaataggatcatctatcagagtccatgtattgctggattcacaataaaattccgcatttctaccaaccaagaataaccttctaccgaacactaacgcgcatgatttataatgaggataataagtggatggtccaaactgccactgatcatgattgggtagcaaatattctgtagttgtatcagtttcagaatgtcctcccattacgtatataacattgtttatggatgccactgctggattacatctaggtttcagaagactcggcatattaacccaagcagcatccccgtggaaccaacgctcaacagatgtgggatttggtagacctcctactacgtataatttattgttagcgggtatcccgctagcatacagtctggggctattcatcggaggaattggaatccaattgtttgatatataatttacagctatagcattgttatgtatttcattgttcatccatccaccgatgagatatactacttctccaacatgagtacttgtacacatatggaatatatctataatttgatccatgttcataggatactctatgaatggatacttgtatgatttgcgtggttgtttatcacaatgaaatattttggtacagtctagtatccattttacattatttatacctctgggagaaagataatttgacctgattacatttttgataaggagtagcagatttcctaatttatttcttcgcctcatataccacttaatgacaaaatcaactacataatcctcatctggaacatttagttcatcgctttctagaataagtttcatagatagataatcaaaattgtctatgatgtcatcttccagttccaaaaagtgtttggcaataaagtttttagtatgacataagagattggatagtccgtattctatacccatcatgtaacactcgacacaatattcctttctaaaatctcgtaagataaagtttatacaagtgtagatgataaattctacagaggttaatatagaagcacgtaataaattgacgacgttatgactatctatatatacctttccagtatatgagtaaataactatagaagttaaactgtgaatgtcaaggtctagacaaacccttgtaactggatctttatttttcgtgtatttttgacgtaaatgtgtgcgaaagtaaggagataactttttcaatatcgtagaattgactattatattgcctcctatggcatcaataattgttttgaatttcttagtcatagacaatgctaatatattcttacagtacacagtattgacaaatatcggcatttatgtttctttaaaagtcaacatctagagaaaaatgattatctttttgagacataactcccattttttggtattcacccacacgtttttcgaaaaaattagtttttccttccaatgatatattttccatgaaatcaaacggattggtaacattataaatttttttaaatcccaattcagaaatcaatctatccgcgacgaattctatatatgttttcatcatttcacaattcattcctataagtttaactggaagagccgcagtaagaaattcttgttcaatggatactgcatctgttataatagatctaacggtttcttcactcggtggatgcaataaatgtttaaacatcaaacatgcgaaatcgcagtgcagaccctcgtctctactaattagttcgttggaaaacgtgagtccgggcattaggccacgctttttaagccaaaatatggaagcgaatgatccagaaaagaaaattccttctactgcagcaaaggcaataagtctctctccataaccggcgctgtcatgtatccacttttgagcccaatcggccttcttttttacacaaggcatcgtttctatggcattaaagagatagtttttttcattactatctttaacataagtatcgatcaaaagactatacatttccgaatgaatgttttcaatggccatctgaaatccgtagaaacatctagcctcggtaatctgtacttctgtacaaaatcgttccgccaaattttcattcactattccgtcactggctgcaaaaaacgccaatacatgttttataaaatatttttcgtctggtgttagtttattccaatcattgatatctttagatatatctacttcttccactgtccaaaatgatgcctctgcctttttatacatgttccagatgtcatgatattggattgggaaaataacaaatctatttggatttggtgcaaggatgggttccataactaaattaacaataacaataaattttttttcagttatctatatgcctgtacttggattttttgtacatcgatatcgccgcaatcactacaataattacaagtattattgatagcattgttattagtactatcataattaaattatctacattcatgggtgctgaataatcgttattatcatcattatcattttgtaattgtgacatcatactagataaatcgtttgcgagattgttgtgggaagcgggcatggaggatgcattatcattattatttaacgccttccatttggattcacaaatgttacgcacattcaacattttatggaaactataattttgtgaaaacaaataacaagaaaactcgtcatcgttcaaatttttaacgatagtaaaccgattaaacgtcgagctaatttctaacgctagcgactctgttggatatgggtttccagatatatatcttttcagttcccctacgtatctataatcatctgtaggaaatggaagatatttccatttatctactgttcctaatatcatatgtggtggtgtagtagaaccattaagcgcgaaagatgttatttcgcatcgtattttaacttcgcaataatttctggttagataacgcactctaccagtcaagtcaatgatattagcctttacagatatattcatagtagtcgtaacgatgactccatcttttagatgcgatactcctttgtatgtaccagaatcttcgtacctcaaactcgatatatttaaacaagttaatgagatattaacgcgttttatgaatgatgatatataaccagaagttttatcctcggtggctagcgctataaccttatcattataataccaactagtgtgattaatatgtgacacgtcagtgtgggtacaaatatgtacattatcgtctacgtcgtattcgatacatccgcatacagccaacaaatataaaatgacaaatactctaacgccgttcgtacccatcttgatgcggtttaataaatgttttgatttcaatttattgtaaaaaaagattcggttttatactgttcgatattctcattgcttatattttcatctatcatctccacacagtcaaatccgtggttagcatgcacctcatcaaccggtaaaagactatcggactcttctatcattataactctagaatatttaatttggtcattattaatcaagtcaattatcttatttttaacaaacgtgagtattttactcattttttataaaaacttttagaaatatacagactctatcgtgtgtctatatcttctttttatatccaatgtatttatgtctgatttttcttcatttatcatatataatggtccaaattctacacgtgcttcggattcatccagatcattaaggttcttataattgtaacatccttctcttccctcttctacatcttccttcttattcttattcttagcgtcacagaatctaccacagcaggatcccatgacgagcgtcatattaaactaatccattttcaattataatatatgattagtaatgaccattaaaataaaaaatattcttcataaccggcaagaaagtgaaaagttcacattgaaactatgtcagtagtatacatcatgaaatgatgatatatatatactctattttggtggaggattatatgatataattcgtggataatcatttttaagacacatttctttattcgtaaatcttttcacgttaaatgagtgtccatattttgcaatttcttcatatgatggcggtgtacgtggacgaggctgctcctgttcttgttgtggtcgccgactgtcgtgtctgcgtttagatccctccattatcgcgattgcgtagatggagtactattttataccttgtaattaaatttttttattaattaaacgtataaaaacgttccgtatctgtatttaagagccagatttcgtctaatagaacaaatagctacagtaaaaataactagaataattgctacacccactagaaaccacggatcgtaatacggcaatcggttttcgataataggtggaacgtatattttatttaaggacttaacaattgtctgtaaaccacaatttgcttccgcggatcctgtattaactatctgtaaaagcatatgttgaccgggcggagccgaacattctccgatatctaatttctgtatatctataatattattaacctccgcatacgcattacagttcttttctagcttggataccgcactaggtacatcgtctagatctattcctatttcctcagcgatagctcttctatccttttccggaagcaatgaaatcacttcaataaatgattcaaccatgagtgtgaaactaagtcgagaattactcatgcatttgttagttattcggagcgcgcaatttttaaactgtcctataacctctcctatatgaatagcacaagtgacattagtagggatagaatgttgagctaatttttgtaaataactatctataaaaagattatacaaagttttaaactctttagtttccgccatttatccagtctgagaaaatgtctctcataataaatttttccaagaaactaattgggtgaagaatggaaacctttaatctatatttatcacagtctgttttggtacacatgatgaattcttccaatgccgtactaaattcgatatctttttcgatttctggatatgtttttaataaagtatgaacaaagaaatggaaatcgtaataccagttatgtttaactttgaaattgttttttattttcttgttaatgattccagccacttgggaaaagtcaaagtcgtttaatgccgatttaatacgttcattaaaaacaaactttttatcctttagatgaattattattggttcattggaatcaaaaagtaagatattatcgggtttaagatctgcgtgtaaaaagttgtcgcaacagggtagttcgtagattttaatgtataacagagccatctgtaaaaagataaactttatgtattgtaccaaagatttaaatcctaatttgatagctaactcggtatctactttatctgccgaatacagtgctaggggaaaaattataatgtttcctctttcatattcgtagttagttctcttttcatgttcgaaaaagtgaaacatgcggttaaaatagtttataacattaatattactgttaataactgccggataaaagtgggatagtaatttcacgaatttgatactgtcctttctctcgttaaacgcctttaaaaaaactttagaagaatatctcaatgagagttcctgaccatccatagtttgtatcaataatagcaacatatgaagaacacgtttatacagagtatgtaaaaatgttaatttatagtttaatcccatggcccacgcacacacgattaattttttttcatctccctttagattgttgtatagaaatttgggtactgtgaactccgccgtagtttccatgggactatataattttgtggcctcgaatacaaattttactacatagttatctatcttaaagactataccatatcctcctgtagatatgtgataaaaatcgtcgtttataggataaaatcgtttatccttttgttggaaaaaggatgaattaatgtaatcattctcttctatctttagtagtgtttccttattaaaattcttaaaataatttaacaatctaactgacggagcccaattttggtgtaaatctaattgggacattatattgttaaaatacaaacagtctcctaatataacagtatctgataatctatggggagacatccattgatattcaggggatgaatcattggcaacacccatttattgtacaaaaagccccaatttacaaacgaaagtccaggtttgatagagacaaacaattaactattttgtctctgtttttaacacctccacagtttttaatttctttagtaatgaaattattcacaatatcagtatcttctttatctaccagagattttactaacttgataaccttggctgtctcattcaatagggtagtaatatttgtatgtgtgatattgatatctttttgaattgtttcttttagaagtgattctttgatggtgccagcatacgaattacaataatgcagaaactcggttaacatgcaggaattatagtaagccaattccaattgttgcctgtgttgtattagagtgtcaatatgagcaatggtgtccttgcgtttctctgatagaatgcgagcagcgattttggcgttatcatttgacgatatttctggaatgacgaatcctgtttctactaactttttggtaggacaaagtgaaacaatcaagaagatagcttctcctcctatttgtggaagaaattgaactcctctagatgatctactgacgatagtatctccttgacagatattggaccgaattacagaagtacctggaatgtaaagccctgaaaccccctcattttttaagcagattgttgccgtaaatcctgcactatgcccaagatagagagctcctttggtgaatccatctctatgtttcagtttaaccaagaaacagtcagctggtctaaaatttccatctctatctaatacagcatctaacttgatgtcaggaactatgaccggtttaatgttatatgtaacattgagtaaatccttaagttcataatcatcactgtcatcagttatgtacgatccaaacaatgtttctaccggcatagtggatacgaagatgctatccatcagaatgtttccctgattagtattttctatatagctattcttctttaaacgattttccaaatcagtaactatgttcatttttttaggagtaggacgcctagccagtatggaagaggattttctagatcctctcttcaacatctttgatctcgatggaatgcaaaaccccatagtgaaacaaccaacgataaaaataatattgtttttcactttttataattttaccatctgactcatggattcattaatatctttataagagctactaacgtataattctttataactgaactgagatatatacaccggatctatggtttccataattgagtaaatgaatgctcggcaataactaatggcaaatgtatagaacaacgaaattatactagagttgttaaagttaatattttctatgagctgttccaataaattatttgttgtgactgcgttcaagtcataaatcatcttgatactatccagtaaaccgtttttaagttctggaatattatcatcccattgtaaagcccctaattcgactatcgaatatcctgctctgatagcagtttcaatatcgacggacgtcaatactgtaataaaggtggtagtattgtcatcatcgtgataaactacgggaatatggtcgttagtaggtacggtaactttacacaacgcgatatataactttccttttgtaccatttttaacgtagttgggacgtcctgcagggtattgttttgaagaaatgatatcgagaacagatttgatacgatatttgttggattcctgattattcactataatataatctagacagatagatgattcgataaatagagaaggtatatcgttggtaggataatacatccccattccagtattctcggatactctattgatgacactagttaagaacatgtcttctattctagaaaacgaaaacatcctacatggactcattaaaacttctaacgctcctgattgtgtctcgaatgcctcgtacaaggatttcaaggatgccatagattctttgaccaacgatttagaattgcgtttagcatctgatttttttattaaatcgaatggtcggctctctggtttgctaccccaatgataacaatagtcttgtaaagataaaccgcaagaaaatttatacgcatccatccaaataaccctagcaccatcggatgatattaatgtattattatagattttccatccacaattattgggccagtatactgttagcaacggtatatcgaatagattactcatgtaacctactagaatgatagttcgtgtactagtcataatatctttaatccaatctaaaaaatttaaaattagattttttacactgttaaagttaacaaaagtattacccgggtacgtggatatcatatatggcattggtccattatcagtaatagctccataaactgatacggcgatggtttttatatgtgtttgatctaacgaggaagaaattcgcgcccacaattcatctctagatatgtatttaatatcaaacggtaacacatcaatttcgggacgcgtatatgtttctaaatttttaatccaaatataatgatgacctatatgccctattatcatactgtcaactatagtacacctagggaacttacgatacatctgtttcctataatcgttaaattttacaaatctataacatgctaaaccttttgacgacagccattcattaatttctgatatggaatctgtattctcgataccgtatcgttctaaagccagtgctatatctccctgttcgtgggaacgctttcgtataatatcgatcaacggataatctgaagtttttggagaataatatgactcatgatctatttcgtccataaacaatctagacataggaattggaggcgatgatcttaattttgtgcaatgagtcgtcaatcctataacttctaatcttgtaatattcatcatcgacataatactatctatgttatcatcgtatattagtataccatgaccttcttcatttcgtgccaaaatgatatacagtcttaaatagttacgcaatatctcaatagtttcataattgttagctgttttcatcaaggtttgtatcctgtttaacatgatggcgttctataacgtctctattttctatttttaattttttaaatttttaacgatttactgtggctagatacccaatctctctcaaatatttttttagcctcgcttacaagctgtttatctatactattaaaactgacgaatccgtgattttggtaatgggttccgtcgaaatttgccgaagtgatatgaacatattcgtcgtcgactatcaacaattttgtattattctgaatagtgaaaaccttcacagatagatcattttgaacacacaacgcatctagacttttggcggttgccatagaatatacgtcgttcttatcccaattaccaactagaagtctgatcttaactcctctattaatggctgcttctataatggagttgtaaatgtcgggccaatagtagctattaccgtcgacacgtgtagtgggaactatggccaaatgttcaatatctatactagtcttagctgacctgagtttatcaataactacatcggtatctagatctctagaatatcccaataggtgttccggagaatcagtaaagaacactccacctataggattcttaatatgatacgcagtgctaactggcaaacaacaagccgcagagcataaattcaaccatgaattttttgcgctattaaaggctttaaaagtatcaaatcttctacgaagatctgtggccagcgggggataatcagaatatacacctaacgttttaatcgtatgtatagatcctccagtaaatgacgcgtttcctacataacatctttcatcatctgacacccaaaaacaaccgagtagtagtcccacattattttttttatctatattaacggttataaaatttatatccgggcagtgactttgtagctctcccagatttcttttccctcgttcatctagcaaaactattattttaatccctttttcagatgcctcttttagtttatcaaaaataagcgctcccctagtcgtactcagaggattacaacaaaaagatgctatgtatatatatttcttagctagagtgataatttcgttaaaacattcaaatgttgttaaatgatcggatctaaaatccatattttctggtagtgtttctaccagcctacattttgctcccgcaggtaccgatgcaaatggccacatttagttaacataaaaacttatacatcctgttctatcaacgattctagaatatcatcggctatatcgctaaaattttcatcaaagtcgacatcacaacctaactcagtcaatatattaagaagttccatgatgtcatcttcgtctatttctatatccgtatccattgtagattgttgaccgattatcgagtttaaatcattactaatactcaatccttcagaatacaatctgtgtttcattgtaaatttataggcggtgtatttaagttggtagattttcaattatgtattaatatagcaacagtagttcttgctcctccttgattctagcatcctcttcattattttcttctacgtacataaacatgtccaatacgttagacaacacaccgacgatggcggccgcagatctcgagttatgatctacttccttaccgtgcaataaattagaatatattttctacttttacgagaaattaattattgtatttattatttatgggtgaaaaacttactataaaaagcgggtgggtttggaattagtgaaagcttaaaaattgaaattttattttttttttttggaatataaataagctcgaagtcgacagatctaggcctggtaccaggaggaggaattcagcttaaagatgacttcgaaagtttatgatccagaacaaaggaaacggatgataactggtccgcagtggtgggccagatgtaaacaaatgaatgttcttgattcatttattaattattatgattcagaaaaacatgcagaaaatgctgttatttttttacatggtaacgcggcctcttcttatttatggcgacatgttgtgccacatattgagccagtagcgcggtgtattataccagatcttattggtatgggcaaatcaggcaaatctggtaatggttcttataggttacttgatcattacaaatatcttactgcatggtttgaacttcttaatttaccaaagaagatcatttttgtcggccatgattggggtgcttgtttggcatttcattatagctatgagcatcaagataagatcaaagcaatagttcacgctgaaagtgtagtagatgtgattgaatcatgggatgaatggcctgatattgaagaagatattgcgttgatcaaatctgaagaaggagaaaaaatggttttggagaataacttcttcgtggaaaccatgttgccatcaaaaatcatgagaaagttagaaccagaagaatttgcagcatatcttgaaccattcaaagagaaaggtgaagttcgtcgtccaacattatcatggcctcgtgaaatcccgttagtaaaaggtggtaaacctgacgttgtacaaattgttaggaattataatgcttatctacgtgcaagtgatgatttaccaaaaatgtttattgaatcggatccaggattcttttccaatgctattgttgaaggcgccaagaagtttcctaatactgaatttgtcaaagtaaaaggtcttcatttttcgcaagaagatgcacctgatgaaatgggaaaatatatcaaatcgttcgttgagcgagttctcaaaaatgaacaagcggccgccgccaccatgagcaagggcgaggaactgttcactggcgtggtcccaattctcgtggaactggatggcgatgtgaatgggcacaaattttctgtcagcggagagggtgaaggtgatgccacatacggaaagctcaccctgaaattcatctgcaccactggaaagctccctgtgccatggccaacactggtcactaccttcacctatggcgtgcagtgcttttccagatacccagaccatatgaagcagcatgactttttcaagagcgccatgcccgagggctatgtgcaggagagaaccatctttttcaaagatgacgggaactacaagacccgcgctgaagtcaagttcgaaggtgacaccctggtgaatagaatcgagctgaagggcattgactttaaggaggatggaaacattctcggccacaagctggaatacaactataactcccacaatgtgtacatcatggccgacaagcaaaagaatggcatcaaggtcaacttcaagatcagacacaacattgaggatggatccgtgcagctggccgaccattatcaacagaacactccaatcggcgacggccctgtgctcctcccagacaaccattacctgtccacccagtctgccctgtctaaagatcccaacgaaaagagagaccacatggtcctgctggagtttgtgaccgctgctgggatcacacatggcatggacgagctgtacaagtgagcggccgccctgctagcaagcttgctagcggccgctcgagatctgcggccgctacagacacgaatatgactaaaccgatgaccatttaaaaacccctctctagctttcacttaaactgtatcgatcattcttttagcacatgtataatataaaaacattattctatttcgaatttaggcttccaaaaatttttcatccgtaaaccgataataatatatatagacttgttaatagtcggaataaatagattaatgcttaaactatcatcatctccacgattagagatacaatatttacattctttttgctgtttcgaaactttatcaatacacgttaatacaaacccaggaaggagatattgaaactgaggctgttgaaaatgaaacggtgaatacaataattcagataatgtaaaatcatgattccgtattctgatgatattagaactgctaatggatgtcgatggtatgtatctaggagtatctattttaacaaagcatcgatttgctaatatacaattatccttttgattaattgttattttattcatattcttaaaaggtttcatatttatcaattcttctacattaaaaatttccatttttaatttatgtagccccgcaatactcctcattacgtttcattttttgtctataatatccattttgttcatctcggtacatagattatccaattgagaagcgcatttagtagttttgtacattttaagtttattgacgaatcgtcgaaaactagttatagttaacattttattatttgataccctgatattaatacccctgccgttactattatttataactgatgtaatccacgtaacattggaattaactatcgatagtaatgcatcgacgcttccaaaattgtctattataaactcaccgataatttttttattgcatgttttcatattcattaggattatcaaatctttaatcttattacgattgtatgcgttgatattacaagacgtcattctaaaagacggaggatctccatcaaatgccagacaatcacgtacaaagtacatggaaataggttttgttctattgcgcatcatagatttatatagaacacccgtagaaatactaatttgttttactctataaaatactaatgcatctatttcatcgttttgtataacgtctttccaagtgtcaaattccaaatttttttcattgatagtaccaaattcttctatctctttaactacttgcatagataggtaattacagtgatgcctacatgccgttttttgaaactgaatagatgcgtctagaagcgatgctacgctagtcacaatcaccactttcatatttagaatatatatatgtaaaaatatagtagaatttcattttgtttttttctatgctataaatgaattctcattttgcatctgctcatactccgttttatattaataccaaagaaggaagatatctggttctaaaagccgttaaagtatgcgatgttagaactgtagaatgcgaaggaagtaaagcttcctgcgtactcaaagtagataaaccctcatcgcccgcgtgtgagagaagaccttcgtccccgtccagatgcgagagaatgaataaccctggaaaacaagttccgtttatgaggacggacatgctacaaaatatgttcgcggctaatcgcgataatgtagcttctagacttttgtcctaaaatactattatatccttttcgatattaataaatccgtgtcgtccaggttttttatctctttcagtatgtgaatagataggtattttatctctattcatcatcgaatttaagagatccgataaacattgtttgtattctccagatgtcagcatctgatacaacaatatatgtgcacataaacctctggcacttatttcatgtaccttccccttatcactaaggagaatagtatttgagaaatatgtatacatgatattatcatgaattagatatacagaatttgtaacactctcgaaatcacacgatgtgtcggcgttaagatctaatatatcactcgataacacattttcatctagatacactagacattttttaaagctaaaatagtctttagtagtaacagtaactatgcgattattttcatcgatgatacatttcatcggcatattattacgcttaccatcaaagactataccatgtgtatatctaacgtattctagcatggttgccatacgcgcattaaacttttcaggatctttggatagatcttccaatctatctatttgagaaaacatttttatcatgttcaatagttgaaacgtcggatccactatatagatattatctataaagattttaggaactacgttcatggtatcctggcgaatattaaaactatcaatgatatgattatcgttttcatcttttatcaccatatagtttctaagatatgggattttacttaatataatattatttcccgtgataaattttattagaaaggccaaatctataagaaaagtcctagaattagtctgaagaatatctatatcgccgtatagtatatttggattaattagatatagagaatatgatccgtaacatatacaacttttattatggcgtctaagatattcttccatcaacttattaacatttttgactagggaagatacattatgacgtcccattacttttgccttgtctattactgcgacgttcatagaatttagcatatctcttgccaattcttccattgatgttacattataagaaattttagatgaaattacatttggagctttaatagtaagaactcctaatatgtccgtgtatgtggtcactaatacagattgtagttctataatcgtaaataatttacctatattatatgtttgagtctgtttagaaaagtagctaagtatacgatcttttatttctgatgcagatgtattaacatcggaaaaaaatctttttttattcttttttactaaagatacaaatatgtctttgttaaaaacagttattttctgaatatttctagcttgtaattttaacatatgatattcgttcacactaggtactctgcctaaataggtttctataatctttaatgtaatattaggaaaagtattctgatcaggattcctattcattttgaggatttaaaactctgattattgtctaatatggtctctacgcaaactttttcacagagcgatagagtttttgataactcgtttttcttaagaaatataaaactactgtctccagagctcgctctatcttttattttatctaattcgatacaaactcctgatactggttcagaaagtaattcattaattttcagtcctttatagaagatatttaatatagataatacaaaatcttcagtttttgatatcgatctgattgatcctagaactagatatattaataacgtgctcattaggcagtttatggcagcttgataattagatatagtatattccagttcatatttattagataccgcattgcccagattttgatattctatgaattcctctgaaaataaatccaaaataactagacattctattttttgtggattagtgtactctcttccctctatcatgttcactactggtgtccacgatgataaatatctagagggaatataatatagtccataggatgccaatctagcaatgtcgaataactgtaattttattcttcgctcttcattatgaattgattcttgaggtataaacctaacacaaattatattattagacttttcgtatgtaatgtctttcatgttataagtttttaatcctggaatagaatctattttaatgaggcttttaaacgcagagttctccaacgagtcaaagcataatactctgttgtttttcttatatacgatgttacgattttcttctttgaatggaataggtttttgaattagtttataattacaacataatagataaggaagtgtgcaaatagtacgcggaaaaaacataatagctcccctgttttcatccatggttttaagtaaatgatcactggcttctttagtcaatggatattcgaacattaaccgtttcatcatcattggacagaatccatatttcttaatgtaaagagtgatcaaatcattgtgtttattgtaccatcttgttgtaaatgtgtattcggttatcggatctgctcctttttctattaaagtatcgatgtcaatctcgtctaagaattcaactatatcgacatatttcatttgtatacacataaccattactaacgtagaatgtataggaagagatgtaacgggaacagggtttgttgattcgcaaactattctaatacataattcttctgttaatacgtcttgcacgtaatctattatagatgccaagatatctatataattattttgtaagatgatgttaactatgtgatctatataagtagtgtaataattcatgtattttgatatatgttccaactctgtctttgtgatgtctagtttcgtaatatctatagcatcctcaaaaaatatattcgcatatattcccaagtcttcagttctatcttctaaaaaatcttcaacgtatggaatataataatctattttacctcttctgatatcattaatgatatagtttttgacactatcttctgtcaattgattcttattcactatatctaagaaacggatagcgtccctaggacgaactactgccattaatatctctattatagcttctggacataattcatctattataccagaattaatgggaactattccgtatctatctaacatagttttaagaaagtcagaatctaagacttgatgttcatatattggttcatacatgaaatgatctctattgatgatagtgactatttcattctctgaaaattggtaactcattctatatatgctttccttgttgatgaaggatagaatatactcaatagaatttgtaccaacaaactgttctcttatgaatcgtatatcatcatctgaaataatcatgtaaggcatacatttaacaattagagacttgtctcctgttatcaatatactattcttgtgataatttatgtgtgaggcaaatttgtccacgttctttaattttgttatagtagatatcaaatccaatggagctacagttcttggcttaaacagatatagtttttctggaacaaattctacaacattattataaaggactttgggtagataagtgggatgaaatcctattttaattaatgcgatagccttgtcctcgtgcagatatccaaacgcttttgtgatagtatggcattcattgtctagaaacgctctacgaatatctgtgacagatatcatctttagagaatatactagtcgcgttaatagtactacaatttgtattttttaatctatctcaataaaaaaattaatatgtatgattcaatgtataactaaactactaactgttattgataactagaatcagaatctaatgatgacgtaaccaagaagtttatctactgccaatttagctgcattatttttagcatctcgtttagattttccatcggccttatcgaatactcttccgtcgatgtctacacaggcataaaatgtaggagagttactaggcccaactgattcaatacgaaaagaccaatctctcctagtaatttggcagtactcattaataacggtgacagggttagcatctttccaatcaataatttttttagccggaataacatcatcaaaagacttatgatcctctctcattgatttttcgcgggatacatcatctattatgacgtcagccatagcatcagcatccggcttatccgcctccgttgtcataaaccaacgaggaggaatatcgtcggagctgtacaccatagcactacgttgaagatcgtacagagctttattaacttctcgcttctccatattaagttgtctagttagttgtgcagcagtagctccttcgattccaatgtttttaatagccgcacacacaatctctgcgtcagaacgctcgtcaatatagatcttagacatttttagagagaactaacgcaaccagcaataaaactgaacctactttatcatttttttattcatcatcctctggtggttcgtcgttcctatcaaatgtagctctgattaacccgtcatctataggtgatgctggttctggagattctggaggagatggattattatctggaagaatctctgttatttccttgttttcatgtatcgattgcgttgtaacattaagattgcgaaatgctctaaatttgggaggcttaaagtgttgtttgcaatctctacacgcgtgtctaactagtggaggttcgtcagctgctctagtttgaatcatcatcggcgtagtattcctacttttacagttaggacacggtgtattgtatttctcgtcgagaacgttaaaataatcgttgtaactcacatcctttattttatctatattgtattctactcctttcttaatgcattttataccgaataagagatagcgaaggaattctttttcggtgccgctagtacccttaatcatatcacatagtgttttatattccaaatttgtggcaatagacggtttatttctatacgatagtttgtttctggaatcctttgagtattctataccaatattattctttgattcgaatttagtttcttcgatattagattttgtattacctatattcttgatgtagtactttgatgatttttccatggcccattctattaagtcttccaagttggcatcatccacatattgtgatagtaattctcggatatcagtagcggctaccgccattgatgtttgttcattggatgagtaactactaatgtatacattttccatttataacacttatgtattaactttgttcatttatattttttcattattatgttgatattaacaaaagtgaatatatatatgttaataattgtattgtggttatacggctacaattttataatgagtgaaagtcagtgtccgatgatcaatgacgatagctttactctgaaaagaaagtatcaaatcgatagtgcggagtcaacaataaaaatggataagaagaggataaagtttcagaatagagccaaaatggtaaaagaaataaatcagacaataagagcagcacaaactcattacgagacattgaaactaggatacataaaatttaagagaatgattatgactactactctagaagatatagcaccatctattccaaataatcagaaaacttataaactattctcggacatttcagccatcggcaaagcatcacagaatccgagtaagatggtatatgctctgctgctttacatgtttcccaatttgtttggagatgatcatagattcattcgttatagaatgcatccaatgagtaaaatcaaacacaagatcttctctcctttcaaacttaatcttattagaatattagtggaagaaagattctataataatgaatgcagatctaataaatggagaataattggaacacaagttgataaaatgttgatagctgaatctgataaatatacaatagatgcaaggtataacctaaaacccatgtatagaatcaagggagaatctgaagaagataccctctttatcaaacagatggtagaacaatgtgtgacatcccaggaattggtggaaaaagtgttgaagatactgtttagagatttgttcaagagtggagaatacaaagcgtacagatacgatgatgatgtagaaaatggatttattggattggatacactaaaattaaacattgttcatgatatagttgaaccatgtatgcctgttcgtaggccagtggctaagatactgtgtaaagaaatggtaaataaatactttgagaatccgctacatattattggtaaaaatcttcaagagtgcattgactttgttagtgaataggcatttcatctttctccaatactaattcaaattgttaaattaataatggatagtataaatagttattagttataagatagtaaaaataattattagaataagagtgtagtatcatagataactctcttctataaaaatggattttattcgtagaaagtatcttatatacacagtagaaaataatatagattttttaaaggatgatacattaagtaaagtaaacaattttaccctcaatcatgtactagctctcaagtatctagttagcaattttcctcaacacgttattactaaggatgtattagctaataccaatttttttgttttcatacatatggtacgatgttgtaaagtgtacgaagcggttttacgacacgcatttgatgcacccacgttgtacgttaaagcattgactaagaattatttatcgtttagtaacgcaatacaatcgtacaaggaaaccgtgcataaactaacacaagatgaaaaatttttagaggttgccgaatacatggacgaattaggagaacttataggcgtaaattatgacttagttcttaatccattatttcacggaggggaacccatcaaagatatggaaatcatttttttaaaactgtttaagaaaacagacttcaaagttgttaaaaaattaagtgttataagattacttatttgggcatacctaagcaagaaagatacaggcatagagtttgcggataatgatagacaaaatatatacactctatttcaacaaactggtagaatcgtccatagcaatctaacagaaacgtttagagattatatctttcccggagataagactagctattgggtgtggttaaacgaaagtatagctaatgatgcggatatcgttcttaatagacacgccattaccatgtatgataaaattcttagttatatatactctgagataaaacaaggacgcgttaataaaaacatgcttaagttagtttatatctttgagcctgaaaaagatatcagagaacttctgctagaaatcatatatgatattcctggagatatcctatctattattgatgcaaaaaacgacgattggaaaaaatattttattagtttttataaagctaattttattaacggtaatacatttattagtgatagaacgtttaacgaggacttattcagagttgttgttcaaatagatcccgaatatttcgataatgaacgaattatgtctttattctctacgagtgctgcggacattaaacgatttgatgagttagatattaataacagttatatatctaatataatttatgaggtgaacgatatcacattagatacaatggatgatatgaagaagtgtcaaatctttaacgaggatacgtcgtattatgttaaggaatacaatacatacctgtttttgcacgagtcggatcccatggtcatagagaacggaatactaaagaaactgtcatctataaaatccaagagtagacggctgaacttgtttagcaaaaacattttaaaatattatttagacggacaattggctcgtctaggtcttgtgttagatgattataaaggagacttgttagttaaaatgataaaccatcttaagtctgtggaggatgtatccgcattcgttcgattttctacagataaaaaccctagtattcttccatcgctaatcaaaactattttagctagttataatatttccatcatcgtcttatttcaaaggtttttgagagataatctatatcatgtagaagaattcttggataaaagcatccatctaaccaagacggataagaaatatatacttcaattgataagacacggtagatcatagaacagaccaaatatattattaataatttgtatatacatagatataattatcacacatttttgataaatgggaactgctgcaacaattcagactcccaccaaattaatgaataaagaaaatgcagaaatgattttggaaaaaattgttgatcatatagttatgtatattagtgacgaatcaagtgattcagaaaataatcctgaatatattgattttcgtaacagatacgaagactatagatctctcattataaaaagtgatcacgagtttgtaaagctatgtaaaaatcatgcggagaaaagttctccagaaacgcaacaaatgattatcaaacacatatacgaacaatatcttattccagtatctgaagtactattaaaacctataatgtccatgggtgacataattacatataacggatgtaaagacaatgaatggatgctagaacaactctctaccctaaactttaacaatctccgcacatggaactcatgtagcataggcaatgtaacgcgtctgttttatacattttttagttatctgatgaaagataaactaaatatataagtataatcccattctaatactttaacctgatgtattagcatcttattagaatattaacctaactaaaagacataacataaaaactcattacatagttgataaaaagcggtaggatataaatattatggctgccaccgttccgcgttttgacgacgtgtacaaaaatgcacaaagaagaattctagatcaagaaacattttttagtagaggtctaagtagaccgttaatgaaaaacacatatctatttgataattacgcgtatggatggataccagaaactgcaatttggagtagtagatacgcaaacctagatgctagtgactattatcccatttcgttgggattacttaaaaagttcgagtttctcatgtctctatataaaggtcctattcccgtatatgaagaaaaagtaaatactgaattcatagccaatggatcgttctctggtagatacgtatcatatcttcgaaagttttctgcccttccaacaaacgagtttattagttttttgttactgacttccattccaatctataatatcttgttctggtttaaaaacacacagtttgatattactaaacacacattattcagatacgtctatacagataatgccaaacacctggcgttggctaggtatatgcatcaaacaggagactataagcctttgtttagtcgtctcaaagagaattatatatttaccggtcccgttccaataagtatcaaagatatagatcaccctaatcttagtagagcaagaagtccatccgattatgagacattagctaatattagtactatattgtactttaccaagtatgatccggtattaatgtttttattgttttacgtacctgggtattcaattactacaaaaattactccagccgtagaatatctaatggataaactgaatctaacaaagagcgacgtacaactgttgtaaattattttatgcttcgtaaaatgtaggttttgaaccaaacattctttcaaagaatgagatgcataaaactttattatccaatagattgactatttcggacgtcaatcgtttaaagtaaacttcgtaaaatattctttgatcactgccgagtttaaaacttctatcgataattgtctcatatgttttaatatttacaagttttttggtccatggtacattagccggacaaatatatgcaaaataatatcgttctccaagttctatagtttctggattatttttattatattcagtaactaaatacatattagggttatctgcggatttataatttgagtgatgcattctactcaacataaataattctagaggagacgatctactatcaaattcggatcgtaaatctgtttctaaagaacggagaatatctatacatacctgattagaattcatccgtccttcagacaacatctcagacagtctggttttgtacatcttaatcatattcttatgaaacttggaaacatctcttctagtttcactagtacctttattaattctctcaggtacagattttgaattcgacgatgctgagtatttcatcgttgtatatttcttcttcgattgcataatcagattcttatataccgcctcaaactctattttaaaattattaaacaatactctattattaatcagtcgttctaactctttcgctatttctatagacttatctacatcttgactgtctatctctgtaaacacggagtcggtatctccatacacgctacgaaaacgaaatctgtaatctataggcaacgatgttttcacaatcggattaatatctctatcgtccatataaaatggattacttaatggattggcaaaccgtaacataccgttagataactctgctccatttagtaccgattctagatacaagatcattctacgtcctatggatgtgcaactcttagccgaagcgtatgagtatagagcactatttctaaatcccatcagaccatatactgagttggctactatcttgtacgtatattgcatggaatcatagatggccttttcagttgaactggtagcctgttttagcatctttttatatctggctctctctgccaaaaatgttcttaatagtctaggaatggttccttctatcgatctatcgaaaattgctatttcagagatgaggttcggtagtctaggttcacaatgaaccgtaatatatctaggaggtggatatttctgaagcaatagctgattatttatttcttcttccaatctattggtactaacaacgacaccgactaatgtttccggagatagatttccaaagatacacacattaggatacagactgttataatcaaagattaatacattattactaaacattttttgttttggagcaaataccttaccgccttcataaggaaacttttgttttgtttctgatctaactaagatagttttagtttccaacaatagctttaacagtggacccttgatgactgtactcgctctatattcgaataccatggattgaggaagcacatatgttgacgcacccgcgtctgtttttgtttctactccataatactcccacaaatactgacacaaacaagcatcatgaatacagtatctagccatatctaaagctatgtttagattataatccttatacatctgagctaaatcaacgtcatcctttccgaaagataatttatatgtatcattaggtaaagtaggacataatagtacgactttaaatccattttcccaaatatctttacgaattactttacatataatatcctcatcaacagtcacataattacctgtggttaaaacctttgcaaatgcagcggctttgcctttcgcgtctgtagtatcgtcaccgatgaacgtcatttctctaactcctctatttaatactttacccatgcaactgaacgcgttcttggatatagaatccaatttgtacgaatccaatttttcaaatttttgaatgaatgaatatagatcgaaaaatatagttccattattgttattaacgtgaaacgtagtattggccatgccgcctactcccttatgactagactgatttctctcataaatacagagatgtacagcttcctttttgtccggagatctaaagataattttctctcctgttaataactctagacgattagtaatatatctcagatcaaagttatgtccgttaaaggtaacgacgtagtcgaacgttagttccaacaattgtttagctattcgtaacaaaactatttcagaacatagaactagttctcgttcgtaatccatttccattagtgactgtatcctcaaacatcctctatcgacggcttcttgtatttcctgttccgttaacatctcttcattaatgagcgtaaacaataatcgtttaccacttaaatcgatataacagtaacttgtatgcgagattgggttaataaatacagaaggaaacttcttatcgaagtgacactctatatctagaaataagtacgatcttgggatatcgaatctaggtatttttttagcgaaacagttacgtggatcgtcacaatgataacatccattgttaatctttgtcaaatattgctcgtccaacgagtaacatccgtctggagatatcccgttagaaatataaaaccaactaatattgagaaattcatccatggtggcattttgtatgctgcgtttctttggctcttctatcaaccacatatctgcgacggagcattttctatctttaatatctagattataacttattgtctcgtcaatgtctatagttctcatctttcccaacggcctcgcattaaatggaggaggagacaatgactgatatatttcgtccgtcactacgtaataaaagtaatgaggaaatcgtataaatacggtctcgccatttcgacatctggatttcagatataaaaatctgttttcaccgtgactttcaaaccaattaatgcaccgaacatccatttatagaatttagaaatatattttcatttaaatgaatcccaaacattggggaagagccgtatggaccattatttttatagtactttcgcaagcgggtttagacggcaacatagaagcgtgtaaacgaaaactatatactatagttagcactcttccatgtcctgcatgtagacggcacgcgactatcgctatagaggacaataatgtcatgtctagcgatgatctgaattatatttattattttttcatcagattatttaacaatttggcatctgatcccaaatacgcgatcgatgtgacaaaggttaaccctttataaacttaacccattataaaacttatgattagtcacaactgaaataaccgcgtgattattttttggtataattctacacggcatggtttctgtgactatgaattcaacccccgttacattagtgaaatctttaacaaacagcaagggttcgtcaaagacataaaactcattgtttacaatcgaaatagaccccctatcacacttaaaataaaaaatatccttatcctttaccaccaaataaaattctgattggtcaatgtgaatgtattcacttaacagttccacaaatttatttattaactccgaggcacatacatcgtcggtattttttatggcaaactttactcttccagcatccgtttctaaaaaaatattaacgagttccatttatatcatccaatattattgaaatgacgttgatggacagatgatacaaataagaaggtacggtacctttgtccaccatctcctccaattcatgctctattttgtcattaactttaatgtatgaaaacagtacgccacatgcttccatgacagtgtgtaacactttggatacaaaatgtttgacattagtataattgtccaagactgtcaatctataatagatagtagctataatatattctatgatggtattgaagaagatgacaaccttggcatattgatcatttaacacagacatggtatcaacagatagcttgaatgaaagagaatcagtaattggaataagcgtcttctcgatagagtgtccgtataccaacatgtctgatattttgatgtattccattaaattatttagttttttctttttattctcgttaaacagcatttctgtcaacggaccccaacatcgttgaccgattaagttttgattgatttttccgtgtaaggcgtatctagtcagatcgtatagcctatccaataatccatcgtctgtgtgtagatcacatcgtacactttttaattctctatagaagagcgacagacatctggagcaattacagacagcaatttctttattctctacagatgtaagatacttgaagacattcctatgatgatgcagaattttggataacacggtattgatggtatctgttaccataattcctttgatggctgatagtgtcagagcacaagatttccaatctttgacaatttttagcaccattatctttgttttgatatctatatcagacagcatggtgcgtctgacaacacagggattaagacggaaagatgaaatgattctctcaacatcttcaatagataccttgctattttttctggcattatctatatgtgcgagaatatcctctagagaatcagtatcctttttgatgatagtggatctcaatgacatgggacgtttaaaccttcttattctatcaccagattgcatggtgatttgtcttctttcttttatcataatgtaatctctaaattcatcggcaaattgtctatatctaaaatcataatatgagatgtttacctctacaaatatctgttcgtccaatgttagagtatttacatcagttttgtattccaaattaaacatggcaacggatttaattttatattcctctattaagtcctcgtcgataataacagaatgtagataatcatttaatccgtcgtacatggttggaagatgcttgttgacaaaatctttaattgtcttgatgaaggtgggactatatctaacatcttgattaataaaatttataacattgtccataggatactttgtaactagttttatacacatctcttcatcggtaagtttagacagaatatcgtgaacaggtggtatattatattcatcagatatacgaagaacaatgtccaaatctatattgtttaatatattatatagatgtagcgtagctcctacaggaatatctttaactaagtcaatgatttcatcaaccgttagatctattttaaagttaatcatataggcattgatttttaaaaggtatgtagccttgactacattctcattaattaaccattccaagtcattgtgtgtaagaagattatattctatcataagcttgactacatttggtcccgataccattaaagaattcttatgatataaggaaacagattttaggtactcatctactctacaagaattttggagagccttaacgatatcagtgacgtttattatttcaggaggaaagaatctaacattgagaatatcggaattaatagcttccagatacagtgattttggcaatagtccgtgtaatccataatccagtaacacgagctggtgcttgctagacaccttttcaatgtttaatttttttgaaataagctttgataaagccttcctcgcaaattccggatacatgaacatgtcggcgacatgattaagtattgttttttcattatttttatattttctcaacaagttctcaataccccaatagatgatagaatatcacccaatgcgtccatgttgtctatttccaacaggtcgctatatccaccaatagaagtttttccaaaaaagattctaggaacagttctaccaccagtaatttgttcaaaataatcccgcaattcattttcgggtttaaattctttaatatcgacaatttcatacgctcctcttttgaaactaaacttatttagaatatccagtgcatttctacaaaaaggacatgtatacttgacaaaaattgtcactttgttattggccaacctttgttgtacaaattcctcggccattttaatatttaagtgatataaaactatctcgacttatttaactctttagtcgagatatatggacgcagatagctatatgatagccaactacagaaggcaaacgctataaaaaacataattacgacgagcatatttataaatatttttattcagcattacttgatatagtaatattaggcacagtcaaacattcaaccactctcgatacattaactctctcattttctttaacaaattctgcaatatcttcgtaaaaagattcttgaaactttttagaatatctatcgactctagatgaaatagcgttcgtcaacatactatgttttgtatacataaaggcgcccattttaacagtttctagtgacaaaatgctagcgatcctaggatcctttagaatcacatagattgacgattcgtctctcttagtaactctagtaaaataatcatacaatctagtacgcgaaataatattatccttgacttgaggagatctaaacaatctagttttgagaacatcgataagttcatcgggaatgacatacatactatctttaatagaactcttttcatccagttgaatggattcgtccttaaccaactgattaatgagatcttctattttatcattttccagatgatatgtatgtccattaaagttaaattgtgtagcgcttctttttagtctagcagccaatactttaacatcactaatatcgatatacaaaggagatgatttatctatggcattaagaattcgtttttcgacatccgtcaaaaccaattcctttttgcctgtatcatccagttttccatcctttgtaaagaaattattttctactagactattaataagactgataaggattcctccataattgcacaatccaaactttttaacaaaactagactttacgagatctacaggaatgcgtacttcaggttttttagcttgtgattttttcttttgcggacattttctagtaaccaactcatctaccatttcattgattttagcagtgaaataagctttcaatgcacgggcactgatactattgaaaacgagttgatcttcaaattccgccatttaagttcaccaaacaacttttaaatacaaatatatcaatagtagtagaataagaactataaaaaaaataataattaaccaaccccaacaaccggtattattagttgatgtggtagttttctcatcacttagaacagatttaacaatttctataaagtctgtcaaatcatcttccggagaccccataaatacaccaaatatagcggcgtacaacttatccatttatacattgaatattggcttttctttatcgctatcttcatcatattcatcatcaatatcaacaagtcccagattacgagccagatcttcttctacattttcagtcattgatacacgttcactatctccagagagtccgataacgttagccaccacttctctatcaatgattagtttcttgagcgcgaaagtaatttttgtttccgttccggatctatagaagacgataggtgtgataattgccttggccaattgtctttctcttttactgagtgattctagttcaccttctatagatctgagaatggatgattctccagtcgaaacatattctaccatggatccgtttaatttgttgatgaagatggattcatccttaaatgttttctctgtaatagtttccaccgaaagactatgcaaagaatttggaatgcgttccttgtgcttaatgtttccatagacggcttctagaagttgatacaacataggactagccgcggtaacttttatttttagaaagtatccatcgcttctatcttgtttagatttatttttataaagtttagtctctccttccaacataataaaagtggaagtcatttgactagataaactatcagtaagttttatagagatagacgaacaattagcgtattgagaagcatttagtgtaacgtattcgatacattttgcattagatttactaatcgattttgcatactctataacacccgcacaagtctgtagagaatcgctagatgcagtaggtcttggtgaagtttcaactctcttcttgattaccttactcatgattaaacctaaataattgtactttgtaatataatgatatatattttcactttatctcatttgagaataaaaatgtttttgtttaaccactgcatgatgtacagatttcggaatcgcaaaccaccagtggttttattttatccttgtccaatgtgaattgaatgggagcggatgcgggtttcgtacgtagatagtacattcccgtttttagaccgagactccatccgtaaaaatgcatactcgttagtttggaataactcggatctgctatatggatattcatagattgactttgatcgatgaaggctcccctgtctgcagccatttttatgatcgtcttttgtggaatttcccaaatagttttataaactcgcttaatatcttctggaaggtttgtattctgaatggatccaccatctgccataatcctattcttgatctcatcattccataattttctctcggttaaaactctaaggagatgcggattaactacttgaaattctccagacaatactctccgagtgtaaatattactggtatacggttccaccgactcattatttcccaaaatttgagcagttgatgcagtcggcataggtgccaccaataaactatttctaagaccgtatgttctgattttatcttttagaggttcccaattccaaagatccgacggtacaacattccaaagatcatattgtagaataccgttactggcgtacgatcctacatatgtatcgtatggtccttccttctcagctagttcacaactcgcctctaatgcaccgtaataaatggtttcgaagatcttcttatttagatcttgtgcttccaggctatcaaatggataatttaagagaataaacgcgtccgctaatccttgaacaccaataccgataggtctatgtctcttattagagatttcagcttctggaataggataataattaatatctataattttattgagatttctgacaattactttgaccacatccttcagtttgagaaaatcaaatcgcccatctattacaaacatgttcaaggcaacagatgccagattacaaacggctacctcattagcatccgcatattgtattatctcagtgcaaagattactacacttgatagttcctaaattttgttgattactctttttgttacacgcatccttataaagaatgaatggagtaccagtttcaatctgagattctataatcgctttccagacgactcgagcctttattatagatttgtatctcctttctctttcgtatagtgtatacaatcgttcgaactcgtctccccaaacattgtccaatccaggacattcatccggacacatcaacgaccactctccgtcatccttcactcgtttcataaagagatcaggaatccaaagagctataaatagatctctggttctatgttcctcgtttcctgtattctttttaagatcgaggaacgccataatatcagaatgccacggttccaagtatatggccataactccaggccgtttgtttcctccctgatctatgtatctagcggtgttattataaactctcaacattggaataataccgtttgatataccattggtaccggagatatagcttccactggcacgaatattactaattgatagacctattccccctgccattttagagattaatgcgcatcgttttaacgtgtcatagataccctctatgctatcatcgatcatgttaagtagaaaacagctagacatttggtgacgactagttcccgcattaaataaggtaggagaagcgtgcgtaaaccatttttcagaaagtagattgtacgtctcaatagctgagtctatatcccattgatgaattcctactgcgacacgcattaacatgtgctgaggtctttcaacgatcttgttgtttattttcaacaagtaggatttttccaaagttttaaaaccaaaatagttgtatgaaaagtctcgttcgtaaataataaccgagttgagtttatccttatatttgttaactatatccatggtgatacttgaaataatcggagaatgtttcccatttttaggattaacatagttgaataaatcctccatcacttcactaaatagtttttttgtttccttgtgtagatttgatacggctattctggcggctagaatggcataatccggatgttgtgtagtacaagtggctgctatttcggctgccagagtgtccaattctaccgttgttactccattatatattccttgaataaccttcatagctattttaataggatctatatgatccgtgtttaagccataacataattttctaatacgagacgtgattttatcaaacatgacattttccttgtatccatttcgtttaatgacaaacatttttgttggtgtaataaaaaaattatttaacttttcattaatagggatttgacgtatgtagcgtacaaaatgattgttcctggtatatagataaagagtcctatatatttgaaaatcgttacggctcgattaaactttaatgattgcatagtgaatatatcattaggatttaactccttgactatcatggcggcgccagaaattaccatcaaaagcattaatacagttataccgatcgcagttagaacggttatagcatccaccatttatatctaaaaattagatcaaagaatatgtgacaaagtcctagttgtatactgagaattgacgaaacaatgtttcttacatatttttttcttattagtaaccgacttaatagtaggaactggaaaactagacttgattattctataagtatagatacccttccaaataatattctctttgataaaagttccagaaaatgtagaattttttaaaaagttatcttttgctattaccaagattgtgtttagacgcttattattaatatgagtgatgaaatccacaccgcctctagatatcgcctttatttccacattagatggtaaatccaatagtgaaactatctttttaggaatgtatggactcgcgtttagaggagtaaacgtcttaggcgtcggaaaggatgattcatcaaacgaataaacaatttcacaaatggatgttaatgtattagtaggaaattttttgacgctattggaattgaagattctaatggatgatgttctacctatttcatccgataacatgttaatttccgacaccaacggttttaatatttcgatgatatacggtagtctctctttcggacttatatagcttattccacaatacgagtcattatatactccaaaaaacaaaataactagtataaaatctgtatcgaatgggaaaaacgaaattatcgacataggtatagaatccggaacattgaacgtattaatacttaattctttttctgtggtaagtaccgataggttattgacattgtatggttttaaatattctataacttgagacttgatagatattagtgatgaattgaaaattatttttatcaccacgtgtgtttcaggatcatcgtcgacgcccgtcaaccaaccgaacggagtaaaataaatatcattaatatatgctctagatattagtatttttatcaatcctttgattatcatcttctcgtaggcgaatgattccatgatcaagagtgatttaagaacatcctccggagtattaatgggcttagtaaacagtccatcgttgcaataataaaagttatccaagttaaaggatattatgcattcgtttaaagatatcacctcatctgacggagacaattttttggtaggttttagagactttgaagctacttgtttaacaaagttattcatcgtcgtctactattctatttaattttgtagttaatttatcacatatcacattaattgactttttggtccacttttccatacgtttatattcttttaatcctgcgttatccgtttccgttatatccagggatagatcttgcaagttaaatagaatgctcttaaataatgtcattttcttatccgctaaaaatttaaagaatgtataaacctttttcagagatttgaaactcttaggtggtgtcctagtacacaatatcataaacaaactaataaacattccacattcagattccaacagctgattaacttccacattaatacagcctattttcgctccaaatgtacattcgaaaaatctgaataaaacatcgatgtcacaatttgtattatccaatacagaatgtttgtgattcgtgttaaaaccatcggagaaggaatagaaataaaaattattatagtggtggaattcagttggaatattgcctccggagtcataaaaggatactaaacattgttttttatcataaattacacatttccaatgagacaaataacaaaatccaaacattacaaatctagaggtagaacttttaattttgtctttaagtatatacgataagatatgtttattcataaacgcgtcaaatttttcatgaatcgctaaggagtttaagaatctcatgtcaaattgtcctatataatccacttcggatccataagcaaactgagagactaagttcttaatacttcgattgctcatccaggctcctctctcaggctctattttcatcttgacgacctttggattttcaccagtatgtattcctttacgtgataaatcatcgattttcaaatccatttgtgagaagtctatcgccttagatactttttcccgtagtcgaggtttaaaaaaatacgctaacggtatactagtaggtaactcaaagacatcatatatagaatggtaacgcgtctttaactcgtcggttaactctttcttttgatcgagttcgtcgctactattgggtctgctcaggtgccccgactctactagttccaacatcataccgataggaatacaagacactttgccggcggttgtagatttatcatatttttccactacatatccgttacaatttgttaaaaatttagatacatctatattgctacataatccagctagtgaatatatatgacataataaattggtaaatcctagttctggtattttactaattactaaatctgtatatctttccatttatcatggaaaagaatttaccagatatcttcttttttccaaactgcgttaatgtattctcttacaaatattcacaagatgaattcagtaatatgagtaaaacggaacgtgatagtttctcattggccgtgtttccagttataaaacatagatggcataacgcacacgttgtaaaacataaaggaatatacaaagttagtacagaagcacgtggaaaaaaagtatctcctccatcactaggaaaacccgcacacataaacctaaccgcgaagcaatatatatacagtgaacacacaataagctttgaatgttatagttttctaaaatgtataacaaatacagaaatcaattcgttcgatgagtatatattaagaggactattagaagctggtaatagtttacagatattttccaattccgtaggtaaacgaacagatactataggtgtactagggaataagtatccatttagcaaaattccattggcctcattaactcctaaagcacaacgagagatattttcagcgtggatttctcatagacctgtagttttaactggaggaactggagtgggtaagacgtcacaggtacccaagttattgctttggtttaattatttatttggtggattctctactctagataaaatcactgactttcacgaaagaccagtcattctatctcttcctaggatagctttagttagattgcatagcaataccattttaaaatcattgggatttaaggtactagatggatctcctatttctttacggtacggatctataccggaagaattaataaacaaacaaccaaaaaaatatggaattgtattttctacccataagttatctctaacaaaactatttagttatggcactcttattatagacgaagttcatgagcatgatcaaataggagatattattatagcagtagcgagaaagcatcatacgaaaatagattctatgtttttaatgactgccacgttagaggatgacagggaacggctaaaagtatttttacctaatcccgcatttatacatattcctggagatacactgtttaaaattagcgaggtatttattcataataagataaatccatcttccagaatggcatacatagaagaagaaaagagaaatttagttactgctatacagatgtatactcctcctgatggatcatccggtatagtctttgtggcatccgttgcacagtgtcacgaatataaatcatatttagaaaaaagattaccgtatgatatgtatattattcatggtaaggtcttagatatagacgaaatattagaaaaagtgtattcatcacctaatgtatcgataattatttctactccttatttggaatccagcgttactatacgcaatgttacacacatttatgatatgggtagagtttttgtccccgctccttttggaggatcgcaacaatttatttctaaatctatgagagatcaacgaaaaggaagagtaggaagagttaatcctggtacatacgtctatttctatgatctgtcttatatgaagtctatacagcgaatagattcagaatttctacataattatatattgtacgctaataagtttaatctaacactccccgaagatttgtttataatccctacaaatttggatattctatggcgtacaaaggaatatatagactcgttcgatattagtacagaaacatggaataaattattatccaattattatatgaagatgatagagtatgctaaactttatgtactaagtcctattctcgctgaggagttggataactttgagaggacgggagaattaactagtattgtacgagaagccattttatctctaaatttacaaattaagattttaaattttaaacataaagatgatgatacgtatatacacttttgtaaaatattattcggtgtctataacggaacaaacgctactatatattatcatagacctctaacgggatatatgaatatgatttcagatactatatttgttcctgtagataataactaaaaatcaaactctaatgaccacatctttttttagagatgaaaaattttccacatctccttttgtagacacgactaaacattttgcagaaaaaagtttattagtgtttagataatcgtatacttcatcagtgtagatagtaaatgtgaacagataaaaggtattcttgctcaatagattggtaaattccatagaatatattaatcctttcttcttgagatcccacatcatttcaaccagagacgttttatccaatgatttacctcgtactataccacatacaaaactagattttgcagtgacgtcgtacctggtattcctaccaaacaaaattttacttttagttcttttagaaaattctaaggtagaatctctatttgccaatatgtcatctatggaattaccactagcaaaaaatgatagaaatatatattgatacatcgcagctggttttgatctactatactttaaaaacgaatcagattccataattgcctgtatatcatcagctgaaaaactatgttttacacgtattccttcggcatttctttttaatgatatatcttgtttagacaatgataaagttatcatgtccatgagagacgcgtctccgtatcgtataaatatttcattagatgttagacgcttcattaggggtatacttctataaggtttcttaatcagtccatcattggttgcgtcaagaactactatcggatgttgttgggtatctctagtgttacacatggccttactaaagtttgggtaaataactatgatatctctattaattatagatgcatatatttcattcgtcaaggatattagtatcgacttgctatcgtcattaatacgtgtaatgtaatcatataaatcatgcgatagccaaggaaaatttaaatagatgttcatcatataatcgtcgctataattcatattaatacgttgacattgactaatttgtaatatagcctcgccacgaagaaagctctcgtattcagtttcatcgataaaggataccgttaaatataactggttgccgatagtctcatagtctattaagtggtaagtttcgtacaaatacagaatccctaaaatattatctaatgttggattaatctttaccataactgtataaaatggagacggagtcataactattttaccgtttgtacttactggaatagatgaaggaataatctccggacatgctggtaaagacccaaatgtctgtttgaagaaatccaatgttccaggtcctaatctcttaacaaaaattacgatattcgatcccgatatcctttgcattctatttaccagcatatcacgaactatattaagattatctatcatgtctattctcccaccgttatataaatcgcctccgctaagaaacgttagtatatccatacaatggaatacttcatttctaaaatagtattcgttttctaattctttaatgtgaaatcgtatactagaaagggaaaaattatctttgagttttccgttagaaaagaaccacgaaactaatgttctgattgcgtccgattccgttgctgaattaatggatttacaccaaaaactcatataacttctagatgtagaagcattcgctaaaaaattagtagaatcaaaggatataagtagatgttccaacaagtgagcaattcccaagatttcatctatatcattctcgaatccgaaattagaaattcccaagtagatatcctttttcatccgatcgttgatgaaaatacgaactttattcggtaagacaatcatttactaaggagtaaaataggaagtaatgttcgtatgtcgttatcatcgtataaattaaaggtgtgttttttaccattaagtgacattataattttaccaatattggaattataatataggtgtatttgcgcactcgcgacggttgatgcatcggtaaatatagctgtatctaatgttctagtcggtatttcatcatttcgctgtctaataatagcgttttctctatctgtttccattacagctgcctgaagtttattggtcggataatatgtaaaataataagaaatacatacgaataacaaaaataaaataagatataataaagatgccatttagagatctaattttgtttaacttgtccaaattcctacttacagaagatgaggaatcgttggagatagtgtcttccttatgtagaggatttgaaatatcttataatgacttgataacttactttccagataggaaataccataaatatatttataaagtatttgaacatgtagatttatcggaggaattaagtatggaattccatgatacaactctgagagatttagtctatcttagattgtacaagtattccaagtgtatacggccgtgttataaattaggagataatctaaaaggcatagttgttataaaggacaggaatatttatattagggaagcaaatgatgacttgatagaatatctcctcaaggaatacactcctcagatttatacatattctaatgagcgcgtccccataactggttcaaaattaattctttgtggattttctcaagttacatttatggcgtatacaacgtcgcatataacaacaaataaaaaggtagatgttctcgtttccaaaaaatgtatagatgaactagtcgatccaataaattatcaaatacttcaaaatttatttgataaaggaagcggaacaataaacaaaatactcaggaagatattttattcggtaacaggtggccaaactccataggtagctttttctatttcggattttagaatttccaaattcaccagcgatttatcggttttggtgaaatccaaggatttattaatgtccacaaatgccatttgttttgtctgtggattgtatttgaaaatggaaacgatgtagttagatagatgcgctgcgaagtttcctattagggttccgcgcttcacgtcacccagcatacttgaatcaccatcctttaaaaaaaatgataagatatcaacatggagtatatcatactcgaattttaattcttctactgactcactgacattttcacaaatactacaatacggtttaccgaaaataatcagtacgttcttcatttatgggtatcaaaaacttaaaatcgttactgctggaaaataaatcactgacgatattagatgataatttatacaaagtatacaatggaatatttgtggatacaatgagtatttatatagccgtcgccaattgtgtcagaaacttagaagagttaactacggtattcataaaatacgtaaacggatgggtaaaaaagggagggcatgtaaccctttttatcgatagaggaagtataaaaattaaacaagacgttagagacaagagacgtaaatattctaaattaaccaaggacagaaaaatgttagaattagaaaagtgtacatccgaaatacaaaatgttaccggatttatggaagaagaaataaaggcagaaatgcaattaaaaatcgataaactcacatttcaaatatatttatctgattctgataacataaaaatatcattgaatgagatactaacacatttcaacaataatgagaatgttacattattttattgtgatgaacgagacgcagaattcgttatgtgtctcgaggctaaaacacatttctctaccacaggagaatggccgttgataataagtaccgatcaggatactatgctatttgcatctgctgataatcatcctaagatgataaaaaacttaactcaactgtttaaatttgttccctcggcagaggataactatttagcaaaattaacggcgttagtgaatggatgtgatttctttcctggactctatggggcatctataacacccaccaacttaaacaaaatacaattgtttagtgattttacaatcgataatatagtcactagtttggcaattaaaaattattatagaaagactaactctaccgtagacgtgcgtaatattgttacgtttataaacgattacgctaatttagacgatgtctactcgtatattcctccttgtcaatgcactgttcaagaatttatattttccgcattagatgaaaaatggaatgaatttaaatcatcttatttagaaagcgtgccgttaccctgccaattaatgtacgcgttagaaccacgcaaggagattgatgtttcagaagttaaaactttatcatcttatatagatttcgaaaatactaaatcagatatcgatgttataaaatctatatcctcgatcttcggatattctaacgaaaactgtaacacgatagtattcggcatctataaggataatttactactgagtataaataattcattttactttaacgatagtctgttaataaccaatactaaaagtgataatataataaatataggttactagattaaaaatggtgttccaactcgtgtgctctacatgcggtaaagatatttctcacgaacgatataaattgattatacgaaaaaaatcattaaaggatgtactcgtcagtgtaaagaacgaatgttgtaggttaaaattatctacacaaatagaacctcaacgtaacttaacagtgcaacctctattggatataaactaatatggatccggttaattttatcaagacatatgcgcctagaggttctattatttttattaattataccatgtcattaacaagtcatttgaatccatcgatagaaaaacatgtgggtatttattatggtacgttattatcggaacacttggtagttgaatctacctatagaaaaggagttcgaatagtcccattggatagtttttttgaaggatatcttagtgcaaaagtatacatgttagagaatattcaagttatgaaaatagcagctgatacgtcattaactttattgggtattccgtatggatttggtcatgatagaatgtattgttttaaattggtagctgactgttataaaaatgccggtattgatacatcgtctaaacgaatattgggcaaagatatttttctgagccaaaacttcacagacgataatagatggataaagatatatgattctaataatttaacattttggcaaattgattaccttaaagggtgagttaatatgcataactactcctccgttgttttttccctcgttctttttcttaacgttgtttgccatcactctcataatgtaaagatattctaaaatggtaaacttttgcatatcggacgcagaaattggtataaatgttgtaattgtattatttcccgtcaatggactagtcacagctccatcagttttatatcctttagagtatttctcactcgtgtctaacattctagagcattccatgatctgtttatcgttgatattggccggaaagatagattttttattttttattatattactattggcaattgtagatataacttctggtaaatatttttctaccttttcaatctcttctattttcaagccggctatatattctgctatattgttgctagtatcaataccttttctggctaagaagtcatatgtggtattcactatatcagttttaactggtagttccattagcctttccacttctgcagaataatcagaaattggttctttaccagaaaatccagctactataataggctcaccgatgatcattggcaaaatcctatattgtaccagattaatgagagcatatttcatttccaataattctgctagttcttgagacattgatttatttgatgaatctagttggttctctagatactctaccatttctgccgcatacaataacttgttagataaaatcagggttatcaaagtgtttagcgtggctagaatagtgggcttgcatgtattaaagaatgcggtagtatgagtaaaccgttttaacgaattatatagtctccagaaatctgtggcgttacatacatgagccgaatgacatcgaagattgtccaatatttttaatagctgctctttgtccattatttctatatttgactcgcaacaattgtagataccattaatcaccgattcctttttcgatgccggacaatagcacaattgtttagctttggactctatgtattcagaattaatagatatatctctcaatacagattgcactatacattttgaaactatgtcaaaaattgtagaacgacgctgttctgcagccatttaactttaaataatttacaaaaatttaaaatgagcatccgtataaaaatcgataaactgcgccaaattgtggcatatttttcagagttcagtgaagaagtgtctataaatgtagactcgacggatgagttaatgtatatttttgccgccttgggcggatctgtaaacatttgggcaattatacctctaagtgcatcagtgttttaccgaggagccgaaaatattgtgtttaatcttcctgtgtccaaggtaaaatcgtgtttgtgtagttttcacaatgatgccatcatagatatagaacctgatctggaaaataatctagtaaaactttctagttatcatgtagtaagtgtcgattgtaacaaggaactgatgcctattaggacagatactactatttgtctaagtatagatcaaaagaaatcttacgtgtttaattttcacaagtatgaagaaaaatgttgtggtagaaccgtcattcatctagaatggttgttgggctttatcaagtgtattagtcagcatcagcatctggctattatgtttaaagatgacaatattattatgaagactcctggtaatactgatgcgttttccagggaatattctatgactgaatgttctcaagaactacaaaagttttctttcaaaatagctatctcgtctctcaacaaactacgaggattcaaaaagagagtcaatgtttttgaaactagaatcgtaatggataatgacgataacattttaggaatgttgttttcggatagagttcaatcctttaagatcaacatctttatggcgtttttagattaatactttcaatgagataaatatgggtggcggagtaagtgttgagctccctaaacgggatccgcctccgggagtacccactgatgagatgttattaaacgtggataaaatgcatgacgtgatagctcccgctaagcttttagaatatgtgcatataggaccactagcaaaagataaagaggataaagtaaagaaaagatatccagagtttagattagtcaacacaggacccggtggtctttcggcattgttaagacaatcgtataatggaaccgcacccaattgctgtcgcacttttaatcgtactcattattggaagaaggatggaaagatatcagataagtatgaagagggtgcagtattagaatcgtgttggccagacgttcacgacactggaaaatgcgatgttgatttattcgactggtgtcagggggatacgttcgatagaaacatatgccatcagtggatcggttcagcctttaataggagtaatagaactgtagagggtcaacaatcgttaataaatctgtataataagatgcaaacattatgtagtaaagatgctagtgtaccaatatgcgaatcatttttgcattatttacgcgcacacaatacagaagatagcaaagagatgatcgattatattctaagacaacagtctgcggactttaaacagaaatatatgagatgtagttatcccactagagataagttagaagagtcattaaaatatgcggaacctcgagaatgttgggatccagagtgttcgaatgccaatgttaatttcttactaacacgtaattataataatttaggactttgcaatattgtacgatgtaataccagcgtgaacaacttacagatggataaaacttcctcattaagattgtcatgtggattaagcaatagtgatagattttctactgttcccgtcaatagagcaaaagtagttcaacataatattaaacactcgttcgacctaaaattgcatttgatcagtttattatctctcttggtaatatggatactaattgtagctatttaaatgggtgccgcggcaagcatacagacgacggtgaatacactcagcgaacgtatctcgtctaaattagaacaagaagcgaacgctagtgctcaaacaaaatgtgatatagaaatcggaaatttttatatccgacaaaaccatggatgtaacctcactgttaaaaatatgtgctctgcggacgcggatgctcagttggatgctgtgttatcagccgctacagaaacatatagtggattaacaccggaacaaaaagcatacgtgccagctatgtttactgctgcgttaaacattcagacgagtgtaaacactgttgttagagattttgaaaattatgtgaaacagacttgtaattctagcgcggtcgtcgataacaaattaaagatacaaaacgtaatcatagatgaatgttacggagccccaggatctccaacaaatttggaatttattaatacaggatctagcaaaggaaattgtgccattaaagcgttgatgcaattgacgactaaggccactactcaaatagcacctagacaagttgctggtacaggagttcagttttatatgattgttatcggtgttataatattggcagcgttgtttatgtactatgccaagcgtatgttgttcacatccaccaatgataaaatcaaacttattttagccaataaggaaaacgtccattggactacttacatggacacattctttagaacttctccgatggttattgctaccacggatatgcaaaactgaaaatatattgataatattttaatagattaacatggaagttatcgctgatcgtctagacgatatagtgaaacaaaatatagcggatgaaaaatttgtagattttgttatacacggtctagagcatcaatgtcctgctatacttcgaccattaattaggttgtttattgatatactattatttgttatagtaatttatatttttacggtacgtctagtaagtagaaattatcaaatgttgttggtggtgctagtcatcacattaactattttttattactttatactataatagtactagactgacttctaacaaacatctcacctgccataaataaatgcttgatattaaagtcttctatttctaacactattccatctgtggaaaataatactctgacattatcgctaattgacacatcggtgagtgatatgcctataaagtaataatcttctttgggcacatataccagtgtaccaggttctaacaacctatttactggtgctcctgtagcatactttttctttaccttgagaatatccatcgtttgcttggtcaatagcgatatgtgattttttatcaaccactcaaaaaagtaattggagtgttcatatcctctacgggctattgtctcatggccgtgtatgaaatttaagtaacacgactgtggtagatttgttctatagagccgattgccgcaaatagatagaactaccaatatgtctgtacaaatgttaaacattaattgattaacagaaaaaacaatgttcgttctgggaatagaaaccagatcaaaacaaaattcgttagaatatatgccacgtttatacatggaatataaaataactacagtttgaaaaataacagtatcatttaaacatttaacttgcggggttaatctcacaactttactgtttttgaactgttcaaaatatagcatcgatccgtgagaaatacgtttagccgcctttaatagaggaaatcccaccgcctttctggatctcaccaacgacgatagttctgaccagcaactcatttcttcatcatccacctgttttaacatataataggcaggagatagatatccgtcattgcaatattccttctcgtaggcacacaatctaatattgataaaatctccattctcttctctgcatttattatcttgtctcggtggctgattaggctgtggtcttggtttaggccttggtctatcgttgttgaatctattttggtcattaaatctttcatttcttcctggtatatttctatcacctcgtttggttggatttttgtctatattatcgtttgtaacatcggtacgggtattcatttatcacaaaaaaaacttctctaaatgagtctactgctagaaaacctcatcgaagaagataccatattttttgcaggaagtatatctgagtatgatgatttacaaatggttattgccggcgcaaaatccaaatttccaagatctatgctttctatttttaatatagtacctagaacgatgtcaaaatatgagttggagttgattcataacgaaaatatcacaggagcaatgtttaccacaatgtataatataagaaacaatttgggtctaggagatgataaactaactattgaagccattgaaaactatttcttggatcctaacaatgaagttatgcctcttattattaataatacggatatgactgccgtcattcctaaaaaaagtggtaggagaaagaataagaacatggttatcttccgtcaaggatcatcacctatcttgtgcattttcgaaactcgtaaaaagattaatatttataaagaaaatatggaatccgcgtcgactgagtatacacctatcggagacaacaaggctttgatatctaaatatgcgggaattaatgtcctgaatgtgtattctccttccacatccataagattgaatgccatttacggattcaccaataaaaataaactagagaaacttagtactaataaggaactagaatcgtatagttctagccctcttcaagaacccattaggttaaatgattttctgggactattggaatgtgttaaaaagaatattcctctaacagatattccgacaaaggattgattactataaatggagaatgttcctaatgtatactttaatcctgtgtttatagagcccacgtttaaacattctttattaagtgtttataaacacagattaatagttttatttgaagtattcgttgtattcattctaatatatgtattttttagatctgaattaaatatgttcttcatgcctaaacgaaaaatacccgatcctattgatagattacgacgtgctaatctagcgtgtgaagacgataaattaatgatctatggattaccatggatgacaactcaaacatctgcgttatcaataaatagtaaaccgatagtgtataaagattgtgcaaagcttttgcgatcaataaatggatcacaaccagtatctcttaacgatgttcttcgcagatgatgattcattttttaagtatttggctagtcaagatgatgaatcttcattatctgatatattgcaaatcactcaatatctagactttctgttattattattgatccaatcaaaaaataaattagaagctgtgggtcattgttatgaatctctttcagaggaatacagacaattgacaaaattcacagactttcaagattttaaaaaactgtttaacaaggtccctattgttacagatggaagggtcaaacttaataaaggatatttgttcgactttgtgattagtttgatgcgattcaaaaaagaatcctctctagctaccaccgcaatagatcctgttagatacatagatcctcgtcgcaatatcgcattttctaacgtgatggatatattaaagtcgaataaagtgaacaataattaattctttattgtcatcatgaacggcggacatattcagttgataatcggccccatgttttcaggtaaaagtacagaattaattagacgagttagacgttatcaaatagctcaatataaatgcgtgactataaaatattctaacgataatagatacggaacgggactatggacgcatgataagaataattttgaagcattggaagcaactaaactatgtgatgtcttggaatcaattacagatttctccgtgataggtatcgatgaaggacagttctttccagacattgttgaattagatcgataaaaattaattaattacccgggtaccaggcctagatctgtcgagatccggtggtggtgcaaatcaaagaactgctcctcagtggatgttgcctttacttctaggcctgtacggaagtgttacttctgctctaaaagctgctgcagggggggggggggggtgggggggccggttagggccgccatcccctcagagcgtcgggatatcgggtggcggctcgggacggaggacgcgctagtgttcttctgtgtggcagttcagaatgatggatcaagctagatcagcattctctaacttgtttggtggagaaccattgtcatatacccggttcagcctggctcggcaagtagatggcgataacagtcatgtggagatgaaacttgctgtagatgaagaagaaaatgctgacaataacacaaaggccaatgtcacaaaaccaaaaaggtgtagtggaagtatctgctatgggactattgctgtgatcgtctttttcttgattggatttatgattggctacttgggctattgtaaaggggtagaaccaaaaactgagtgtgagagactggcaggaaccgagtctccagtgagggaggagccaggagaggacttccctgcagcacgtcgcttatattgggatgacctgaagagaaagttgtcggagaaactggacagcacagacttcaccagcaccatcaagctgctgaatgaaaattcatatgtccctcgtgaggctggatctcaaaaagatgaaaatcttgcgttgtatgttgaaaatcaatttcgtgaatttaaactcagcaaagtctggcgtgatcaacattttgttaagattcaggtcaaagacagcgctcaaaactcggtgatcatagttgataagaacggtagacttgtttacctggtggagaatcctgggggttatgtggcgtatagtaaggctgcaacagttactggtaaactggtccatgctaattttggtactaaaaaagattttgaggatttatacactcctgtgaatggatctatagtgattgtcagagcagggaaaatcacctttgcagaaaaggttgcaaatgctgaaagcttaaatgcaattggtgtgttgatatacatggaccagactaaatttcccattgttaacgcagaactttcattctttggacatgctcatctggggacaggtgacccttacacacctggattcccttccttcaatcacactcagtttccaccatctcggtcatcaggattgcctaatatacctgtccagacaatctccagagctgctgcagaaaagctgtttgggaatatggaaggagactgtccctctgactggaaaacagactctacatgtaggatggtaacctcagaaagcaagaatgtgaagctcactgtgagcaatgtgctgaaagagataaaaattcttaacatctttggagttattaaaggctttgtagaaccagatcactatgttgtagttggggcccagagagatgcatggggccctggagctgcaaaatccggtgtaggcacagctctcctattgaaacttgcccagatgttctcagatatggtcttaaaagatgggtttcagcccagcagaagcattatctttgccagttggagtgctggagactttggatcggttggtgccactgaatggctagagggatacctttcgtccctgcatttaaaggctttcacttatattaatctggataaagcggttcttggtaccagcaacttcaaggtttctgccagcccactgttgtatacgcttattgagaaaacaatgcaaaatgtgaagcatccggttactgggcaatttctatatcaggacagcaactgggccagcaaagttgagaaactcactttagacaatgctgctttccctttccttgcatattctggaatcccagcagtttctttctgtttttgcgaggacacagattatccttatttgggtaccaccatggacacctataaggaactgattgagaggattcctgagttgaacaaagtggcacgagcagctgcagaggtcgctggtcagttcgtgattaaactaacccatgatgttgaattgaacctggactatgagaggtacaacagccaactgctttcatttgtgagggatctgaaccaatacagagcagacataaaggaaatgggcctgagtttacagtggctgtattctgctcgtggagacttcttccgtgctacttccagactaacaacagatttcgggaatgctgagaaaacagacagatttgtcatgaagaaactcaatgatcgtgtcatgagagtggagtatcacttcctctctccctacgtatctccaaaagagtctcctttccgacatgtcttctggggctccggctctcacacgctgccagctttactggagaacttgaaactgcgtaaacaaaataacggtgcttttaatgaaacgctgttcagaaaccagttggctctagctacttggactattcagggagctgcaaatgccctctctggtgacgtttgggacattgacaatgagttttaaatgtgatacccatagcttccatgagaacagcagggtagtctggtttctagacttgtgctgatcgtgctaaattttcagtagggctacaaaacctgatgttaaaattccatcccatcatcttggtactactagatgtctttaggcagcagcttttaatacagggtagataacctgtacttcaagttaaagtgaataaccacttaaaaaatgtccatgatggaatattcccctatctctagaattttaagtgctttgtaatgggaactgcctctttcctgttgttgttaatgaaaatgtcagaaaccagttatgtgaatgatctctctgaatcctaagggctggtctctgctgaaggttgtaagtggtcgcttactttgagtgatcctccaacttcatttgatgctaaataggagataccaggttgaaagaccttctccaaatgagatctaagcctttccataaggaatgtagctggtttcctcattcctgaaagaaacagttaactttcagaagagatgggcttgttttcttgccaatgaggtctgaaatggaggtccttctgctggataaaatgaggttcaactgttgattgcaggaataaggccttaatatgttaacctcagtgtcatttatgaaaagaggggaccagaagccaaagacttagtatattttcttttcctctgtcccttcccccataagcctccatttagttctttgttatttttgtttcttccaaagcacattgaaagagaaccagtttcaggtgtttagttgcagactcagtttgtcagactttaaagaataatatgctgccaaattttggccaaagtgttaatcttaggggagagctttctgtccttttggcactgagatatttattgtttatttatcagtgacagagttcactataaatggtgtttttttaatagaatataattatcggaagcagtgccttccataattatgacagttatactgtcggttttttttaaataaaagcagcatctgctaataaaacccaacagatactggaagttttgcatttatggtcaacacttaagggttttagaaaacagccgtcagccaaatgtaattgaataaagttgaagctaagatttagagatgaattaaatttaattaggggttgctaagaagcgagcactgaccagataagaatgctggttttcctaaatgcagtgaattgtgaccaagttataaatcaatgtcacttaaaggctgtggtagtactcctgcaaaattttatagctcagtttatccaaggtgtaactctaattcccattttgcaaaatttccagtacctttgtcacaatcctaacacattatcgggagcagtatcttccataatgtataaagaacaaggtagtttttacctaccacagtgtctgtatcggagacagtgatctccatatgttacactaagggtgtaagtaattatcgggaacagtgtttcccataattttcttcatgcaatgacatcttcaaagcttgaagatcgttagtatctaacatgtatcccaactcctataattccctatcttttagttttagttgcagaaacattttgtggtcattaagcattgggtgggtaaattcaaccactgtaaaatgaaattactacaaaatttgaaatttagcttgggtttttgttacctttatggtttctccaggtcctctacttaatgagatagtagcatacatttataatgtttgctattgacaagtcattttaactttatcacattatttgcatgttacctcctataaacttagtgcggacaagttttaatccagaattgaccttttgacttaaagcagagggactttgtatagaaggtttgggggctgtggggaaggagagtcccctgaaggtctgacacgtctgcctacccattcgtggtgatcaattaaatgtaggtatgaataagttcgaagctccgtgagtgaaccatcattataaacgtgatgatcagctgtttgtcatagggcagttggaaacggcctcctagggaaaagttcatagggtctcttcaggttcttagtgtcacttacctagatttacagcctcacttgaatgtgtcactactcacagtctctttaatcttcagttttatctttaatctcctcttttatcttggactgacatttagcgtagctaagtgaaaaggtcatagctgagattcctggttcgggtgttacgcacacgtacttaaatgaaagcatgtggcatgttcatcgtataacacaatatgaatacagggcatgcattttgcagcagtgagtctcttcagaaaacccttttctacagttagggttgagttacttcctatcaagccagtacgtgctaacaggctcaatattcctgaatgaaatatcagactagtgacaagctcctggtcttgagatgtcttctcgttaaggagatgggccttttggaggtaaaggataaaatgaatgagttctgtcatgattcactattctagaacttgcatgacctttactgtgttagctctttgaatgttcttgaaattttagactttctttgtaaacaaatgatatgtccttatcattgtataaaagctgttatgtgcaacagtgtggagattccttgtctgatttaataaaatacttaaacactgaaaaaaaaaaaaaaaaaaaaaaaaaaaaaaaaaaaaaaaaaaaaaaaaaaaaaaaaaaaaaaaaaaaaaaaaaaaaaaaaagtaccttctgaggcggaaagaaccagccggatctcgacttcgagcttatttatattccaaaaaaaaaaaataaaatttcaatttttaagctttcactaattccaaacccacccgctttttatagtaagtttttcacccataaataataaatacaataattaatttctcgtaaaagtagaaaatatattctaatttattgcacggtaaggaagtagatcataactcgagcatgggagatcccgtcgttttacaacgtcgtgactgggaaaaccctggcgttacccaacttaatcgccttgcagcacatccccctttcgccagctggcgtaatagcgaagaggcccgcaccgatcgcccttcccaacagttgcgcagcctgaatggcgaatggcgctttgcctggtttccggcaccagaagcggtgccggaaagctggctggagtgcgatcttcctgaggccgatactgtcgtcgtcccctcaaactggcagatgcacggttacgatgcgcccatctacaccaacgtgacctatcccattacggtcaatccgccgtttgttcccacggagaatccgacgggttgttactcgctcacatttaatgttgatgaaagctggctacaggaaggccagacgcgaattatttttgatggcgttaactcggcgtttcatctgtggtgcaacgggcgctgggtcggttacggccaggacagtcgtttgccgtctgaatttgacctgagcgcatttttacgcgccggagaaaaccgcctcgcggtgatggtgctgcgctggagtgacggcagttatctggaagatcaggatatgtggcggatgagcggcattttccgtgacgtctcgttgctgcataaaccgactacacaaatcagcgatttccatgttgccactcgctttaatgatgatttcagccgcgctgtactggaggctgaagttcagatgtgcggcgagttgcgtgactacctacgggtaacagtttctttatggcagggtgaaacgcaggtcgccagcggcaccgcgcctttcggcggtgaaattatcgatgagcgtggtggttatgccgatcgcgtcacactacgtctgaacgtcgaaaacccgaaactgtggagcgccgaaatcccgaatctctatcgtgcggtggttgaactgcacaccgccgacggcacgctgattgaagcagaagcctgcgatgtcggtttccgcgaggtgcggattgaaaatggtctgctgctgctgaacggcaagccgttgctgattcgaggcgttaaccgtcacgagcatcatcctctgcatggtcaggtcatggatgagcagacgatggtgcaggatatcctgctgatgaagcagaacaactttaacgccgtgcgctgttcgcattatccgaaccatccgctgtggtacacgctgtgcgaccgctacggcctgtatgtggtggatgaagccaatattgaaacccacggcatggtgccaatgaatcgtctgaccgatgatccgcgctggctaccggcgatgagcgaacgcgtaacgcgaatggtgcagcgcgatcgtaatcacccgagtgtgatcatctggtcgctggggaatgaatcaggccacggcgctaatcacgacgcgctgtatcgctggatcaaatctgtcgatccttcccgcccggtgcagtatgaaggcggcggagccgacaccacggccaccgatattatttgcccgatgtacgcgcgcgtggatgaagaccagcccttcccggctgtgccgaaatggtccatcaaaaaatggctttcgctacctggagagacgcgcccgctgatcctttgcgaatacgcccacgcgatgggtaacagtcttggcggtttcgctaaatactggcaggcgtttcgtcagtatccccgtttacagggcggcttcgtctgggactgggtggatcagtcgctgattaaatatgatgaaaacggcaacccgtggtcggcttacggcggtgattttggcgatacgccgaacgatcgccagttctgtatgaacggtctggtctttgccgaccgcacgccgcatccagcgctgacggaagcaaaacaccagcagcagtttttccagttccgtttatccgggcaaaccatcgaagtgaccagcgaatacctgttccgtcatagcgataacgagctcctgcactggatggtggcgctggatggtaagccgctggcaagcggtgaagtgcctctggatgtcgctccacaaggtaaacagttgattgaactgcctgaactaccgcagccggagagcgccgggcaactctggctcacagtacgcgtagtgcaaccgaacgcgaccgcatggtcagaagccgggcacatcagcgcctggcagcagtggcgtctggcggaaaacctcagtgtgacgctccccgccgcgtcccacgccatcccgcatctgaccaccagcgaaatggatttttgcatcgagctgggtaataagcgttggcaatttaaccgccagtcaggctttctttcacagatgtggattggcgataaaaaacaactgctgacgccgctgcgcgatcagttcacccgtgcaccgctggataacgacattggcgtaagtgaagcgacccgcattgaccctaacgcctgggtcgaacgctggaaggcggcgggccattaccaggccgaagcagcgttgttgcagtgcacggcagatacacttgctgatgcggtgctgattacgaccgctcacgcgtggcagcatcaggggaaaaccttatttatcagccggaaaacctaccggattgatggtagtggtcaaatggcgattaccgttgatgttgaagtggcgagcgatacaccgcatccggcgcggattggcctgaactgccagctggcgcaggtagcagagcgggtaaactggctcggattagggccgcaagaaaactatcccgaccgccttactgccgcctgttttgaccgctgggatctgccattgtcagacatgtataccccgtacgtcttcccgagcgaaaacggtctgcgctgcgggacgcgcgaattgaattatggcccacaccagtggcgcggcgacttccagttcaacatcagccgctacagtcaacagcaactgatggaaaccagccatcgccatctgctgcacgcggaagaaggcacatggctgaatatcgacggtttccatatggggattggtggcgacgactcctggagcccgtcagtatcggcggaattccagctgagcgccggtcgctaccattaccagttggtctggtgtcaaaaataataataaccgggcaggggggatccaattctgtgagcgtatggcaaacgaaggaaaaatagttatagtagccgcactcgatgggacatttcaacgtaaaccgtttaataatattttgaatcttattccattatctgaaatggtggtaaaactaactgctgtgtgtatgaaatgctttaaggaggcttccttttctaaacgattgggtgaggaaaccgagatagaaataataggaggtaatgatatgtatcaatcggtgtgtagaaagtgttacatcgactcataatattatattttttatctaaaaaactaaaaataaacattgattaaattttaatataatacttaaaaatggatgttgtgtcgttagataaaccgtttatgtattttgaggaaattgataatgagttagattacgaaccagaaagtgcaaatgaggtcgcaaaaaaactgccgtatcaaggacagttaaaactattactaggagaattattttttcttagtaagttacagcgacacggtatattagatggtgccaccgtagtgtatataggatctgctcccggtacacatatacgttatttgagagatcatttctataatttaggagtgatcatcaaatggatgctaattgacggccgccatcatgatcctattttaaatggattgcgtgatgtgactctagtgactcggttcgttgatgaggaatatctacgatccatcaaaaaacaactgcatccttctaagattattttaatttctgatgtgagatccaaacgaggaggaaatgaacctagtacggcggatttactaagtaattacgctctacaaaatgtcatgattagtattttaaaccccgtggcgtctagtcttaaatggagatgcccgtttccagatcaatggatcaaggacttttatatcccacacggtaataaaatgttacaaccttttgctccttcatattcagctgaaatgagattattaagtatttataccggtgagaacatgagactgactcgagttaccaaattagacgctgtaaattatgaaaaaaagatgtactaccttaataagatcgtccgtaacaaagtagttgttaactttgattatcctaatcaggaatatgactattttcacatgtactttatgctgaggaccgtgtactgcaataaaacatttcctactactaaagcaaaggtactatttctacaacaatctatatttcgtttcttaaatattccaacaacatcaactgaaaaagttagtcatgaaccaatacaacgtaaaatatctagcaaaaattctatgtctaaaaacagaaatagcaagagatccgtacgcggtaataaatagaaacgtactactgagatatactaccgatatagagtataatgatttagttactttaataaccgttagacataaaattgattctatgaaaactgtgtttcaggtatttaacgaatcatccataaattatactccggttgatgatgattatggagaaccaatcattataacatcgtatcttcaaaaaggtcataacaagtttcctgtaaattttctatacatagatgtggtaatatctgacttatttcctagctttgttagactagatactacagaaactaatatagttaatagtgtactacaaacaggcgatggtaaaaagactcttcgtcttcccaaaatgttagagacggaaatagttgtcaagattctctatcgccctaatataccattaaaaattgttagatttttccgcaataacatggtaactggagtagagatagccgatagatctgttatttcagtcgctgattaatcaattagtagagatgagataagaacattataataatcaataatatatcttatatcttatatcttatatcttatatcttgtttagaaaaatgctaatattaaaatagctaacgctagtaatccaatcggaagccatttgatatctataatagggtatctaatttcctgatttaaatagcggacagctatattctcggtagctactcgtttggaatcacaaacattatttacatctaatttactatctgtaatggaaacgtttcccaatgaaatggtacaatccgatacattgcattttgttatatttttttttaaagaggctggtaacaacgcatcgcttcgtttacatggctcgtaccaacaataatagggtaatcttgtatctattcctatccgtactatgcttttatcaggataaatacatttacatcgtatatcgtctttgttagcatcacagaatgcataaatttgttcgtccgtcatgataaaaatttaaagtgtaaatataactattatttttatagttgtaataaaaagggaaatttgattgtatactttcggttctttaaaagaaactgacttgataaaaatggctgtaatctctaaggttacgtatagtctatatgatcaaaaagagattaatgctacagatattatcattagtcatgttaaaaatgacgacgatatcggtaccgttaaagatggtagactaggtgctatggatggggcattatgtaagacttgtgggaaaacggaattggaatgtttcggtcactggggtaaagtaagtatttataaaactcatatagttaagcctgaatttatttcagaaattattcgtttactgaatcatatatgtattcactgcggattattgcgttcacgagaaccgtattccgacgatattaacctaaaagagttatcgggacacgctcttaggagattaaaggataaaatattatccaagaaaaagtcatgttggaacagtgaatgtatgcaaccgtatcaaaaaattactttttcaaagaaaaaggtttgtttcgtcaacaagttggatgatattaacgttcctaattctctcatctatcaaaagttaatttctattcatgaaaagttttggccattattagaaattcatcaatatccagctaacttattttatacagactactttcccatccctccgttgattattagaccggctattagtttttggatagatagtatacccaaagagaccaatgaattaacttacttattaggtatgatcgttaagaattgtaacttgaatgctgatgaacaggttatccagaaggcggtaatagaatacgatgatattaaaattatttctaataacactaccagtatcaatttatcatatattacatccggcaaaaataatatgattagaagttatatcgtcgcccgacgaaaagatcagaccgctagatctgtaattggtcccagtacatctatcaccgttaatgaggtaggaatgcccgcatatattagaaatacacttacagaaaagatatttgttaatgcctttacagtggataaagttaaacaactattagcgtcaaaccaagttaaattttactttaataaacgattaaaccaattaacaagaatacgccaaggaaagtttattaaaaataaaatacatttattgcctggtgattgggtagaagtagctgttcaagaatatacaagtattatttttggaagacagccgtctctacatagatacaacgtcatcgcttcatctatcagagctaccgaaggagatactatcaaaatatctcccggaattgccaactctcaaaatgctgatttcgacggggatgaggaatggatgatattagaacaaaatcctaaagctgtaattgaacaaagtattcttatgtatccgacgacgttactcaaacacgatattcatggagcccccgtttatggatctattcaagatgaaatcgtagcagcgtattcattgtttaggatacaagatctttgtttagatgaagtattgaacatcttggggaaatatggaagagagttcgatcctaaaggtaaatgtaaattcagcggtaaagatatctatacttacttgataggtgaaaagattaattatccgggtctcttaaaggatggtgaaattattgcaaacgacgtagatagtaattttgttgtggctatgaggcatctgtcattggctggactcttatccgatcataagtcgaacgtggaaggtatcaactttattatcaagtcatcttatgtttttaagagatatctatctatttacggttttggggtgacattcaaagatctgagaccaaattcgacgttcactaataaattggaggccatcaacgtagaaaaaatagaacttatcaaagaagcatacgccaaatatctcaacgatgtaagagacgggaaaatagttccattatctaaagctttagaggcggactatgtggaatccatgttatccaacttgacaaatcttaatatccgagagatagaagaacatatgagacaaacgctgatagatgatccagataataacctcctgaaaatggccaaagcgggttataaagtaaatcccacagaactaatgtatattctaggtacgtatggacaacaaaggattgatggtgaaccagcagagactcgagtattgggtagagttttaccttactatcttccagactctaaggatccagaaggaagaggttacattcttaattctttaacaaaaggattaacgggttctcaatattacttttcgatgctggttgccagatctcaatctactgatatcgtctgtgaaacatcacgtaccggaacactggctagaaaaatcattaaaaagatggaggatatggtggtcgacggatacggacaagtagttataggtaatacgctcatcaagtacgccgccaattataccaaaattctaggctcagtatgtaaacctgtagatcttatctatccagatgagtccatgacttggtatttggaaattagtgctctgtggaataaaataaaacagggattcgtttactctcagaaacagaaacttgcaaagaagacattggcgccgtttaatttcctagtattcgtcaaacccaccactgaggataatgctattaaggttaaggatctgtacgatatgattcataacgtcattgatgatgtgagagagaaatacttctttacggtatctaatatagattttatggagtatatattcttgacgcatcttaatccttctagaattagaattacaaaagaaacggctatcactatctttgaaaagttctatgaaaaactcaattatactctaggtggtggaactcctattggaattatttctgcacaggtattgtctgagaagtttacacaacaagccctgtccagttttcacactactgaaaaaagtggtgccgtcaaacaaaaacttggtttcaacgagtttaataacttgactaatttgagtaagaataagaccgaaattatcactctggtatccgatgatatctctaaacttcaatctgttaagattaatttcgaatttgtatgtttgggagaattaaatccaaacatcactcttcgaaaagaaacagataaatatgtagtagatataatagtcaatagattatacatcaagagagcagaaataaccgaattagtcgtcgaatatatgattgaacgatttatctcctttagcgtcattgtaaaggaatggggtatggagacattcattgaggacgaggataatattagatttactgtctacctaaatttcgttgaaccggaagaattgaatcttagtaagtttatgatggttcttccgggggcagccaacaagggaaagattagtaaattcaagattcctatctctgattatacgggatatgacgacttcaatcaaacaaaaaagctcaataagatgactgtagaactcatgaatctaaaagaattgggttctttcgatttggaaaacgtcaacgtgtatcctggagtatggaatacatacgatatcttcggtatcgaggccgctcgtgaatacttgtgcgaagccatgttaaacacctatggagaagggttcgattatctgtatcagccttgtgatcttctcgctagtttactatgtgctagttacgaaccagaatcagtgaataaattcaagttcggcgcagctagtactcttaagagagctacgttcggagacaataaagcattgttaaacgcggctcttcataaaaagtcagaacctattaacgataatagtagctgccacttttttagcaaggtccctaatataggaactggatattacaaatactttatcgacttgggtcttctcatgagaatggaaaggaaactatctgataagatatcttctcaaaagatcaaggaaatggaagaaacagaagacttttaattcttatcaataacatatttttctatgatctgtcttttaaacgatggattttccacaaatgcgcctctcaagtccctcatagaatgatacacgtataaaaaatatagcataggcaatgactccttatttttagacattagatatgccaaaatcatagccccgcttctatttactcccgcagcacaatgaaccaacacgggctcgtttcgttgatcacatttagataaaaaggcggttacgtcgtcaaaatatttactaatatcggtagttgtatcatctaccaacggtatatgaataatattaatattagagttaggtaatgtatatttatccatcgtcaaatttaaaacatatttgaacttaacttcagatgatggtgcatccatagcatttttataatttcccaaatacacattattggttacccttgtcattatagtgggagatttggctttgtgcatatctccagttgaacgtagtagtaagtatttatacaaacttttcttatccatttataacgtacaaatggataaaactactttatcggtaaacgcgtgtaatttagaatacgttagagaaaaggctatagtaggcgtacaagcagccaaaacatcaacacttatattctttgttattatattggcaattagtgcgctattactctggtttcagacgtctgataatccagtctttaatgaattaacgagatatatgcgaattaaaaatacggttaacgattggaaatcattaacggatagcaaaacaaaattagaaagtgatagaggtagacttctagccgctggtaaggatgatatatttgaattcaaatgtgtggatttcggcgcctattttatagctatgcgattggataagaaaacatatctgccgcaagctattaggcgaggtactggagacgcgtggatggttaaaaaggcggcaaaggtcgatccatctgctcaacaattttgtcagtatttgataaaacacaagtctaataatgttattacttgtggtaatgagatgttaaatgaattaggttatagcggttattttatgtcaccgcattggtgttccgattttagtaatatggaatagtgttagataaatgcggtaacgaatgttcctgtaaggaaccataacagcttagatttaacgttaaagatgagcataaacataataaacaaaattacaatcaaacttataacattaatatcaaacaatccaaaaaatgaaatcagtggagtagtaaacgcgtacataactcctggataacgtttagcagctgccgttcctattctagaccaaaaattcggtttcatgttttcgaaacggtattctgcaacaagtcgaggatcgtgttctacatatttggcggcattatccagtatctgcctattgatcttcatttcgttttcgattctggctatttcaaaataaaatcccgatgatagacctccagactttataatttcatctacgatgttcagcgccgtagtaactctaataatataggctgataagctaacatcataccctcctgtatatgtgaatatggcatgatttttgtccattacaagctcggttttaactttattgcctgtaataatttctctcatctgtaggatatctatttttttgtcatgcattgccttcaagacgggacgaagaaacgtaatatcctcaataacgttatcgttttctacaataactacatattctacctttttattttctaactcggtaaaaaaattagaatcccatagggctaaatgtctagcgatatttcttttcgtttcctctgtacacatagtgttacaaaaccctgaaaagaagtgagtatacttgtcatcatttctaatgtttcctccagtccactgtataaacgcataatccttgtaatgatctggatcatccttgactaccacaacatttcttttttctggcataacttcgttgtcctttacatcatcgaacttctgatcattaatatgctcatgaacattaggaaatgtttctgatggaggtctatcaataactggcacaacaataacaggagttttcaccgccgccatttagttattgaaattaatcatatacaactctttaatacgagttatattttcgtctatccattgtttcacattgacatatttcgacaaaaagatataaaatgcgtattccaatgcttctctgtttaatgaattactaaaatatacaaacacgtcactgtctggcaataaatgatatcttagaatattgtaacaatttattttgtattgcacatgttcgtgatctatgagttcttcttcgaatggcataggatctccgaatctgaaaacgtataaataggagttagaataataatatttgagagtattggtaatatataaactctttagcggtataattagtttttttctctcaatttctatttttagatgtgatggaaaaatgactaattttgtagcattagtatcatgaactctaatcaaaatcttaatatcttcgtcacacgttagctctttgaagtttttaagagatgcatcagttggttctacagatggagtaggtgcaacaattttttgttctacacatgtatgtactggagccattgttttaactataatggtgcttgtatcgaaaaactttaatgcagatagcggaagctcttcgccgcgactttctacgtcgtaattgggttctaacgccgatctctgaatggatactagttttctaagttctaatgtgattctctgaaaatgtaaatccaattcctccggcattatagatgtgtatacatcggtaaataaaactatagtatccaacgatcccttctcgcaaattctagtcttaaccaaaaaatcgtatataaccacggagatggcgtatttaagagtggattcttctaccgttttgttcttggatgtcatataggaaactataaagtccgcactactgttaagaatgattactaacgcaactatatagtttaaattaagcattttggaaacataaaataactctgtagacgatacttgactttcgaataagtttgcagacaaacgaagaaagaacagacctctcttaatttcagaagaaaactttttttcgtattcctgacgtctagagtttatatcaataagaaagttaagaattagtcggttaatgttgtatttcattacccaagtttgagatttcataatattatcaaaagacatgataatattaaagataaagcgctgactatgaacgaaatagctatatggttcgctcaagaatatagtcttgttaaacgtggaaacgataactgtatttttaatcacgtcagcggcatctaaattaaatataggtatatttattccacacactctacaatatgccacaccatcttcataataaataaattcgttagcaaaattattaattttagtgaaatagttagcgtcaactttcatagcttccttcaatctaatttgatgctcacacggtgcgaattccactctaacatcccttttccatgcctcaggttcatcgatctctataatatctagttttttgcgtttcacaaacacaggctcgtctctcgcgatgagatctgtatagtaactatgtaaatgataactagatagaaagatgtagctatatagatgacgatcctttaagagaggtataataactttaccccaatcagatagactgttgttatggtcttcggaaaaagaatttttataaatttttccagtattttccaaatatacgtacttaacatctaaaaaatccttaatgataataggaatggataatccgtctattttataaagaaatacatatcgcacattatacttttttttggaaatgggaataccgatgtgtctacataaatatgcaaagtctaaatattttttagagaatcttagttggtccaaattcttttccaagtacggtaatagatttttcatattgaacggtatcttcttaatctctggttctagttccgcattaaatgatgaaactaagtcactatttttataactaacgattacatcacctctaacatcatcatttaccagaatactgatcttcttttgtcgtaaatacatgtctaatgtgttaaaaaaaagatcatacaagttatacgtcatttcatctgtggtattcttgtcattgaaggataaactcgtactaatctcttctttaacagcctgttcaaatttatatcctatatacgaaaaaatagcaaccagtgtttgatcatccgcgtcaatattctgttctatcgtagtgtataacaatcgtatatcttcttctgtgatagtcgatacgttataaaggttgataacgaaaatatttttatttcgtgaaataaagtcatcgtaggattttggacttatattcgcgtctagtagatatgcttttatttttggaatgatctcaattagaatagtctctttagagtccatttaaagttacaaacaactaggaaattggtttatgatgtataatttttttagtttttatagattctttattctatacttaaaaaatgaaaataaatacaaaggttcttgagggttgtgttaaattgaaagcgagaaataatcataaattatttcattatcgcgatatccgttaagtttgtatcgtaatggcgtggtcaattacgaataaagcggatactagtagcttcacaaagatggctgaaatcagagctcatctaaaaaatagcgctgaaaataaagataaaaacgaggatattttcccggaagatgtaataattccatctactaagcccaaaaccaaacgagccactactcctcgtaaaccagcggctactaaaagatcaaccaaaaaggaggaagtggaagaagaagtagttatagaggaatatcatcaaacaactgaaaaaaattctccatctcctggagtcagcgacattgtagaaagcgtggccgctgtagagctcgatgatagcgacggggatgatgaacctatggtacaagttgaagctggtaaagtaaatcatagtgctagaagcgatctctctgacctaaaggtggctaccgacaatatcgttaaagatcttaagaaaattattactagaatctctgcagtatcgacggttctagaggatgttcaagcagctggtatctctagacaatttacttctatgactaaagctattacaacactatctgatctagtcaccgagggaaaatctaaagttgttcgtaaaaaagttaaaacttgtaagaagtaaatgcgtgcacttttttataaagatggtaaactctttaccgataataattttttaaatcctgtatcagacgataatccagcgtatgaggttttgcaacatgttaaaattcctactcatttaacagatgtagtagtatatgaacaaacgtgggaggaggcgttaactagattaatttttgtgggaagtgattcaaaaggacgtagacaatacttttacggaaaaatgcatgtacagaatcgcaacgctaaaagagatcgtatttttgttagagtatataacgttatgaaacgaattaattgttttataaacaaaaatataaagaaatcgtccacagattccaattatcagttggcggtttttatgttaatggaaactatgttttttattagatttggtaaaatgaaatatcttaaggagaatgaaacagtagggttattaacactaaaaaataaacacatagaaataagtcccgatgaaatagttatcaagtttgtaggaaaggacaaagtttcacatgaatttgttgttcataagtctaatagactatataaaccgctattgaaactgacggatgattctagtcccgaagaatttctgttcaacaaactaagtgaacgaaaggtatacgaatgtatcaaacagtttggtattagaatcaaggatctccgaacgtatggagtcaattatacgtttttatataatttttggacaaatgtaaagtccatatctcctcttccgtcaccaaaaaagttaatagcattaactatcaaacaaactgctgaagtggtaggtcatactccatcaatttcaaaaagagcttatatggcaacgactattttagaaatggtaaaggataaaaattttttagatgtagtatctaaaactacgttcgatgaattcctatctatagtcgtagatcacgttaaatcatctacggatggatgatatagatctttacacaaataattacaagaccgataaatggaaatggataagcgtatgaaatctctcgcaatgacagctttcttcggagagctaagcacattagatattatggcattgataatgtctatatttaaacgccatccaaacaataccattttttcagtggataaggatggtcagtttatgattgatttcgaatacgataattataaggcttctcaatatttggatctgaccctcactccgatatctggagatgaatgcaagactcacgcatcgagtatagccgaacaattggcgtgtgcggatattattaaagaggatattagcgaatatatcaaaactactccccgtcttaaacgatttataaaaaaataccgcaatagatcagatactcgtatcagtcgagatacagaaaagcttaaaatagctctagctaaaggcatagattacgaatatataaaagacgcttgttaataagtaaatgaaaaaaaactagtcgtttataataaaacacgatatggatgccaacgtagtatcattttctactattgcgacgtatatagacgctttagcgaagaatgcttcggaattagaacagaggtctaccgcatacgaaataaataatgaattggaactagtatttattaagccgccattgattactttgacaaatgtagtgaatatctctacgattcaggaatcgtttattcgatttaccgttactaataaggaaggtgttaaaattagaactaagattccattatctaaggtacatggtctagatgtaaaaaatgtacagttagtagatgctatagataacatagtttgggaaaagaaatcattagtgacggaaaatcgtcttcacaaagaatgcttgttgagactatcgacagaggaacgtcatatatttttggattacaagaaatatggatcctctatccgactagaattagtcaatcttattcaagcaaaaacaaaaaactttacgatagactttaagctaaaatattttctaggatccggtgcccagtctaaaagttctttgttgcacgctattaatcatccaaagtcaaggcctaatacatctctggaaatagaattcacacctagagacaatgaaacagttccatatgatgaactaataaaggaattgacgactctctcgcgtcatatatttatggcttctccagagaatgtaattctttctccgcctattaacgcgcctataaaaacctttatgttgcctaaacaagatatagtaggtttggatctggaaaatctatatgccgtaactaagactgacggcattcctataactatcagagttacatcaaacgggttgtattgttattttacacatcttggttatattattagatatcctgttaagagaataatagattccgaagtagtagtctttggtgaggcagttaaggataagaactggaccgtatatctcattaagctaatagagcctgtgaatgcaatcaatgatagactagaagaaagtaagtatgttgaatctaaactagtggatatttgtgatcggatagtattcaagtcaaagaaatacgaaggtccgtttactacaactagtgaagtcgtcgatatgttatctacatatttaccaaagcaaccagaaggtgttattctgttctattcaaagggacctaaatctaacattgattttaaaattaaaaaggaaaatactatagaccaaactgcaaatgtagtatttaggtacatgtccagtgaaccaattatctttggagaatcgtctatctttgtagagtataagaaatttagcaacgataaaggctttcctaaagaatatggttctggtaagattgtgttatataacggcgttaattatctaaataatatctattgtttggaatatattaatacacataatgaagtgggtattaagtccgtggttgtacctattaagtttatagcagaattcttagttaatggagaaatacttaaacctagaattgataaaaccatgaaatatattaactcagaagattattatggaaatcaacataatatcatagtcgaacatttaagagatcaaagcatcaaaataggagatatctttaacgaggataaactatcggatgtgggacatcaatacgccaataatgataaatttagattaaatccagaagttagttattttacgaataaacgaactagaggaccgttgggaattttatcaaactacgtcaagactcttcttatttctatgtattgttccaaaacatttttagacgattccaacaaacgaaaggtattggcgattgattttggaaacggtgctgacctggaaaaatacttttatggagagattgcgttattggtagcgacggatccggatgctgatgctatagctagaggaaatgaaagatacaacaaattaaactctggaattaaaaccaagtactacaaatttgactacattcaggaaactattcgatccgatacatttgtctctagtgtcagagaagtattctattttggaaagtttaatatcatcgactggcagtttgctatccattattcttttcatccgagacattatgctaccgtcatgaataacttatccgaactaactgcttctggaggcaaggtattaatcactaccatggacggagacaaattatcaaaattaacagataaaaagacttttataattcataagaatttacctagtagcgaaaactatatgtctgtagaaaaaatagctgatgatagaatagtggtatataatccatcaacaatgtctactccaatgactgaatacattatcaaaaagaacgatatagtcagagtgtttaacgaatacggatttgttcttgtagataacgttgatttcgctacaattatagaacgaagtaaaaagtttattaatggcgcatctacaatggaagatagaccgtctacaaaaaactttttcgaactaaatagaggagccattaaatgtgaaggtttagatgtcgaagacttacttagttactatgttgtttatgtcttttctaagcggtaaataataatatggtatgggttctgatctcccagttctaaatgcattaaataattccaatagagcgatttttgttcctataggaccttccaactgtggatactctgtattgttaatagatatattaatacttttgtcgggtaacagaggttctacgtcttctaaaaataaaagttttataacatctggcctgttcataaataaaaacttggcgattctatatatactcttattatcaaatctagccattgtcttatagatgtgagctactgtaggtgtaccatttgattttctttctaatactatatatttctctcgaagaagttcttgcacatcatctgggaataaaatactactgttgagtaaatcagttattttttttatatcgatattgatggacatttttatagttaaggataataagtatcccaaagtcgataacgacgataacgaagtatttatacttttaggaaatcacaatgactttatcagattaaaattaacaaaattaaaggagcatgtatttttttctgaatatattgtgactccagatacatatggatctttatgcgtcgaattaaatgggtctagttttcagcacggcggtagatatatagaggtggaggaatttatagatgctggaagacaagttagatggtgttctacatccaatcatatatctaaagatatacccgaagatatgcacactgataaatttgtcatttatgatatttatacgtttgattcgttcaagaataaacgattggtattcgtacaggtacctccgtcgttaggagatgatagtcatttgactaatccgttattgtcaccgtattatcgtaattcagtagccagacaaatggtcaatgatatgatttttaatcaagattcatttttaaaatatttattagaacatctgattagaagccactatagagtttctaaacatataacaatagttagatacaaggataccgaagaattaaatctaacgagaatatgttataatagagataagtttaaggcgtttgtattcgcttggtttaacggcgtttcggaaaatgaaaaggtactagatacgtataaaaaggtatctaatttgatataatgaattcagtgactgtatcacacgcgccatatactattacttatcacgatgattgggaaccagtaatgagtcaattggtagagttttataacgaagtagccagttggctgctacgagacgagacgtcgcctattcctgataagttctttatacagttgaaacaaccgcttagaaataaacgagtatgtgtgtgtggtatagatccgtatccgaaagatggaactggtgtaccgttcgaatcaccaaattttacaaaaaaatcaattaaggagatagcttcatctatatctagattaaccggagtaattgattataaaggttataaccttaatataatagacggggttataccctggaattattacttaagttgtaaattaggagaaacaaaaagtcacgcgatttactgggataagatttccaagttactgctgcagcatataactaaacacgttagtgttctttattgtttgggtaaaacagatttctcgaatatacgggccaagttagaatccccggtaactaccatagtcggatatcatccagcggctagagaccgccaattcgagaaagatagatcatttgaaattatcaacgttttactggaattagacaacaaggcacctataaattgggctcaagggtttatttattaatgctttagtgaaattttaacttgtgttctaaatggatgcggctattagaggtaatgatgttatctttgttcttaagactataggtgtcccgtcagcgtgcagacaaaatgaagatccaagatttgtagaagcatttaaatgcgacgagttagaaagatatattgagaataatccagaatgtacactattcgaaagtcttagggatgaggaagcatactctatagtcagaattttcatggatgtagatttagacgcgtgtctagacgaaatagattatttaacggccattcaagattttattatcgaggtgtcaaactgtgtagctagattcgcgtttacagaatgcggcgccattcatgaaaatgtaataaaatccatgagatctaatttttcattgactaagtctacaaatagagataaaacaagttttcatattatctttttagatacgtataccactatggatacattgatagctatgaaacgaacactattagaattaagtagatcatctgaaaatccactaaccagatcgatagacactgccgtatataggagaaaaacaactcttcgggttgtaggtactaggaaaaatccaaattgcgacactattcatgtaatgcaaccaccgcatgataatatagaagattacctattcacttacgtggatatgaacaacaatagttattacttttctctacaacaacgattggaggatttagttcctgataagttatgggaaccagggtttatttcattcgaagacgctataaaaagagtttcaaaaatattcattaattctataataaactttaatgatctcgatgaaaataattttacaacggtaccactggtcatagattacgtaacaccttgtgcattatgtaaaaaacgatcgcataaacatccgcatcaactatcgttggaaaatggtgctattagaatttacaaaactggtaatccacatagttgtaaagttaaaattgttccgttggatggtaataaactgtttaatattgcacaaagaattttagacactaactctgttttattaaccgaacgaggagaccatatagtttggattaataattcatggaaatttaacagcgaagaacccttgataacaaaactaattttgtcaataagacatcaactacctaaggaatattcaagcgaattactctgtccaagaaaacgaaagactgtagaagctaacatacgagacatgttagtagattcagtggagaccgatacctatccggataaacttccgtttaaaaatggtgtattggacctggtagacggaatgttttactctggagatgatgctaaaaaatatacgtgtactgtatcaaccggatttaaatttgacgatacaaagttcgtcgaagacagtccagaaatggaagagttaatgaatatcattaacgatatccaaccattaacggatgaaaataagaaaaatagagagctatatgaaaaaacattatctagttgtttatgcggtgctaccaaaggatgtttaacattcttttttggagaaactgcaactggaaagtcgacaaccaaacgtttgttaaagtctgctatcggtgacctgtttgttgagacgggtcaaacaattttaacagatgtattggataaaggacctaatccatttatcgctaacatgcatttgaaaagatctgtattctgtagcgaactacctgattttgcctgtagtggatcaaagaaaattagatctgacaatattaaaaagttgacagaaccttgtgtcattggaagaccgtgtttctccaataaaattaataatagaaaccatgcgacaatcattatcgatactaattacaaacctgtttttgataggatagataacgcattaatgagaagaattgccgtcgtgcgattcagaacacacttttctcaaccttctggtagagaggctgctgaaaataatgacgcgtacgataaagtcaaactattagacgaggggttagatggtaaaatacaaaataatatatatagatttgcatttctatacttgttggtgaaatggtacaaaaaatatcatgttcctattatgaaactatatcctacacccgaagagattcctgactttgcattctatctcaaaataggtactctgttggtatctagctctgtaaagcatattccattaatgacggacctctccaaaaagggatatatattgtacgataatgtggtcactcttccgttgactactttccaacagaaaatatccaagtattttaattctagactatttggacacgatatagagagcttcatcaatagacataagaaatttgccaatgttagtgatgaatatctgcaatatatattcatagaggatatttcatctccgtaaatatatgctcatatatttatagaagatatcacatatctaaatgaataccggaatcatagatttatttgataatcatgttgatagtataccaactatattacctcatcagttagctactctagattatctagttagaactatcatagatgagaacagaagcgtgttattgttccatattatgggatcaggtaaaacaataatcgctttgttgttcgccttggtagcttccagatttaaaaaggtttacattctagtgccgaacatcaacatcttaaaaattttcaattataatatgggtgtagctatgaacttgtttaatgacgaattcatagctgagaatatctttattcattccacaacaagtttttattctcttaattataacgataacgtcattaattataacggattatctcgctacaataactctatttttatcgttgatgaggcacataatatctttgggaataatactggagaacttatgaccgtgataaaaaataaaaacaagattccttttttactattgtctggatctcccattactaacacacctaatactctgggtcatattatagatttaatgtccgaagagacgatagattttggtgaaattattagtcgtggtaagaaagtaattcagacacttcttaacgaacgcggtgtgaatgtacttaaggatttgcttaaaggaagaatatcatattacgaaatgcctgataaagatctaccaacgataagatatcacggacgtaagtttctagatactagagtagtatattgtcacatgtctaaacttcaagagagagattatatgattactagacgacagctatgttatcatgaaatgtttgataaaaatatgtataacgtgtcaatggcagtattgggacaacttaatctgatgaataatttagatactttatttcaggaacaggataaggaattgtacccaaatctgaaaataaataatggcgtgttatacggagaagaattggtaacgttaaacattagttccaaatttaaatactttattaatcggatacagacactcaacggaaaacattttatatacttttctaattctacatatggcggattggtaattaaatatatcatgctcagtaatggatattctgaatataatggttctcagggaactaatccacatatgataaacggcaaaccaaaaacatttgctatcgttactagtaaaatgaaatcgtctttagaggatctattagatgtgtataattctcctgaaaacgatgatggtagtcaattgatgtttttgttttcatcaaacattatgtccgaatcctatactctaaaagaggtaaggcatatttggtttatgactatcccagatactttttctcaatacaaccaaattcttggacgatctattagaaaattctcttacgccgatatttctgaaccagttaatgtatatcttttagccgccgtatattccgatttcaatgacgaagtgacgtcattaaacgattacacacaggatgaattaattaatgttttaccatttgacatcaaaaagctgttgtatctaaaatttaagacgaaagaaacgaatagaatatactctattcttcaagagatgtctgaaacgtattctcttccaccacatccatcaattgtaaaagttttattgggagaattggtcagacaatttttttataataattctcgtattaagtataacgataccaagttacttaaaatggttacatcagttataaaaaataaagaagacgctaggaattacatagatgatattgtaaacggtcacttctttgtatcgaataaagtatttgataaatctcttttatacaaatacgaaaacgatattattacagtaccgtttagactttcctacgaaccatttgtttggggagttaactttcgtaaagaatataacgtggtatcttctccataaaactgatgagatatataaagaaataaatgtcgagctttgttaccaatggatacctttccgttacattggaaccacacgagctgacgttagacataaaaactaatattaggaatgccgtatataagacgtatctccatagagaaattagtggtaaaatggccaagaaaatagaaattcgtgaagacgtggaattacctctcggcgaaatagttaataattctgtagttataaacgttccgtgtgtaataacctacgcgtattatcacgttggggatatagtcagaggaacattaaacatcgaagatgaatcaaatgtaactattcaatgtggagatttaatctgtaaactaagtagagattcgggtactgtatcatttagcgattcaaagtactgcttttttcgaaatggtaatgcgtatgacaatggcagcgaagtcactgccgttctaatggaggctcaacaaggtatcgaatctagttttgtttttctcgcgaatatcgtcgactcataaaaaagagaatagcggtaagtataaacacgaatactatggcaataattgcgaatgttttattctcttcgatatatttttgataatatgaaaaacatgtctctctcaaatcggacaaccatctcataaaatagttctcgcgcgctggagaggtagttgccgctcgtataatctctccagaataatatacttgcgtgtcgtcgttcaatttatacggatttctatagttctctgttatataatgcggtttgccctcatgattagacgacgacaatagtgttctaaatttagatagttgatcagaatgaatgtttattggcgttggaaaaattatccatacagcgtctgcagagtggttgatagttgttcctagatatgtaaaataatccaacttactaggcagcaaattgtctagataaaatactgaatcaaacggtgcagacgtattggcggatctaatggaatccaattgattaactatcttttgaaaatatacatttttatgatccaatacttgtaagaatatagaaataatgataagtccatcatcgtgtttttttgcctcttcataagaactatattttttcttattccaatgaacaagattaatctctccagagtatttgtacacatctatcaagtgattggatccataatcgtcttcctttccccaatatatatgtagtgatgataacacatattcattggggagaaaccctccacttatatatcctcctttaaaattaatccttactagttttccagtgttctggatagtggttggtttcgactcattataatgtatgtctaacggcttcaatcgcgcgttagaaattgcttttttagtttctatattaataggagatagttgttgcggcatagtaaaaatgaaatgataactgtttaaaaatagctcttagtatgggaattacaatggatgaggaagtgatatttgaaactcctagagaattaatatctattaaacgaataaaagatattccaagatcaaaagacacgcatgtgtttgctgcgtgtataacaagtgacggatatccgttaataggagctagaagaacttcattcgcgttccaggcgatattatctcaacaaaattcagattctatctttagagtatccactaaactattacggtttatgtactacaatgaactaagagaaatctttagacggttgagaaaaggttctatcaacaatatcgatcctcactttgaagagttaatattattgggtggtaaactagataaaaaggaatctattaaagattgtttaagaagagaattaaaagaggaaagtgatgaacgtataacagtaaaagaatttggaaatgtaattctaaaacttacaacacgggataaattatttaataaagtatatataagttattgcatggcgtgttttattaatcaatcgttggaggatttatcgcatactagtatttacaatgtagaaattagaaagattaaatcattaaatgattgtattaacgacgataaatacgaatatctgtcttatatttataatatgctagttaatagtaaatgaacttttacagatctagtataattagtcagattattaagtataatagacgactagctaagtctattatttgcgaggatgactctcaaattattacactcacggcattcgttaaccaatgcctatggtgtcataaacgagtatccgtgtccgctattttattaactactgataacaaaatattagtatgtaacagacgagatagttttctctattctgaaataattagaactagaaacatgtttagaaagaaacgattatttctgaattattccaattatttgaacaaacaggaaagaagtatactatcgtcatttttttctctagatccagctactactgataatgatagaatagacgctatttatccgggtggcatacccaaaaggggtgagaatgttccagagtgtttatccagggaaattaaagaagaagttaatatagacaattcttttgtattcatagacactcggttttttattcatggcatcatagaagataccattattaataaattttttgaggtaatcttctttgtcggaagaatatctctaacgagtgatcaaatcattgatacatttaaaagtaatcatgaaatcaaggatctaatatttttagatccgaattcaggtaatggactccaatacgaaattgcaaaatatgctctagatactgcaaaacttaaatgttacggccatagaggatgttattatgaatcattaaaaaaattaactgaggatgattgattaaaaaatataaattaatttaccatcgtgtatttttataacgggattgtccggcatatcatgtagatagttaccgtctacatcgtatactcgaccatctacgcctttaaatcctctatttattgacattaatctattagaattggaataccaaatattagtaccctcaattagtttattggtaatattttttttagacgatagatcgatggctcttgaaaccaaggttttccaaccggactcattgtcgatcggtgagaagtctttttcattagcatgaatccattctaatgatgtatgtttaaacactctaaacaattggacaaattcttttgatttgctttgaatgatttcaaataggtcttcgtctacagtaggcataccattagataatctagccattataaagtgcacgtttacatatctacgttctggaggagtaagaacgtgactattgagacgaatggctcttcctactatctgacgaagagacgcctcgttccatgtcatatctaaaatgaagatatcattaattgagaaaaaactaataccctcgcctccactagaagagaatacgcatgttttaatgcattctccgttagtgtttgattcttggttaaactcagccaccgccttgattctagtatcttttgttctagatgagaactctatattagagataccaaagactttgaaatatagtaataagatttctattcctgactgattaacaaatggttcaaagactagacatttaccatgggatgctaatattcccaaacatacatctataaatttgacgcttttctcttttaattcagtaaatagagagatatcagccgcactagcatcccctttcaatagttctccctttttaaaggtatctaatgcggatttagaaaactctctatctcttaatgaatttttaaaatcattatatagtgttgctatctcttgcgcgtattcgcccggatcacgattttgtctttcaggaaagctatcgaacgtaaacgtagtagccatacgtctcagaattctaaatgatgatatacctgtttttatttcagcgagtttagccttttgataaatttcttcttgctttttcgacatattaacgtatcgcattaatactgttttcttagcgaatgatgcagacccttctacgtcatcaaaaatagaaaactcgttattaactatatacgaacatagtcctcctagtttggagactaattctttttcatcgactagacgtttattctcaaatagcgattggtgttgtaaggatcctggtcgtagtaagttaaccaacatggtgaattcttgcacactattgacgataggtgtagccgataaacaaatcatcttatggttttttaacgcaatggtcttagataaaaaattatatactgaacgagtaggacggatcttaccatcttctttgattaatgatttagaaatgaagttatgacattcatcaataatgacgcatattctactcttggaattaatagttttgatattagtaaaaaatttatttctaaaattttgatcatcgtaattaataaaaatacaatccttcgttatctctggagcgtatctgagtatagtgttcatccaaggatcttctatcaaagcctttttcaccaataagataatagcccaattcgtataaatatccttaagatgtttgagaatatatacagtagtcattgttttaccgacacccgtttcatggaacaataaaagagaatgcatactgtctaatcctaagaaaactcttgctacaaaatgttgataatccttgaggcgtactacgtccgaccccatcatttcaacgggcatattagtagttctgcgtaaggcataatcgatataggccgcgtgtgatttactcatttatgagtgataagtaataactatgttttaaaaatcacagcagtagtttaactagtcttctctgatgtttgttttcgatactttttgaatcagaagtcatactagaataaagcaacgagtgaacgtaatagagagcttcgtatactctattcgaaaactctaagaacttattaatgaattccgtatccactggattgtttaaaatactaaattgaacactgttcacatccttccaagaagaagacttagtgacggacttaacatgagacataaataaatccaaattttttttacaaacatcactagccaccataatggcgctatctttcaaccagctatcgcttacgcattttagcagtctaacatttttaaagagactacaatatattctcatagtatcgattacacctctaccgaataaagttggaagtttaataatacaatatttttcgtttacaaaatcaaataatggtcgaaacacgtcgaaggttaacatcttataatcgctaatgtatagattgttttcagtgagatgattattagatttaatagcatctcgttcacgtttgaacagtttattgcgtgcgctgaggtcggcaactacggcgtccgctttagtactcctcccataatactttacgctattaatctttaaaatttcatagactttatctagatcgctttctggtaacatgatatcatgtgtaaaaagttttaacatgtcggtcggcattctatttagatcattaactctagaaatctgaagaaagtaattagctccgtattccagactaggtaatgggcttttacctagagacagattaagttctggcaatgtttcataaaatggaagaaggacatgcgttccctcccggatattttttacaatttcatccatttacaactctatagtttgttttcattattattagttattatctcccataatcttggtaatacttaccccttgatcgtaagataccttatacaggtcattacatacaactaccaattgtttttgtacataatagattggatggttgacatccatggtggaataaactactcgaacagatagtttatctttccccctagatacattagccgtaatagttgtcggcctaaagaatatctttggtgtaaagttaaaagttagggttcttgttccattattgctttttgtcagtagttcattataaattctcgagatgggtccgttctctgaatatagaacatcatttccaaatctaacttctagtctagaaataatatcggtcttattcttaaaatctattcccttgatgaagggatcgttaatgaacaaatccttggcctttgattcggctgatctattatctccgttatagacgttacgttgactagtccaaagacttacaggaatagatgtatcgatgatgttgatactatgtgatatgtgagcaaagattgttctcttagtggcatcactatatgttccagtaatggcggaaaactttttagaaatgttatatataaaagaattttttcgtgttccaaacattagcagattagtatgaagataaacactcatattatcaggaacattatcaatttttacatacacatcagcatcttgaatagaaacgataccatcttctggaacctctacgatctcggcagactccggataaccagtcggtgggccatcgctaacaataactagatcatccaacaatctactcacatatgcatctatataatctttttcatcttgtgagtaccctggatacgaaataaatttattatccgtatttccataataaggtttagtataaacagagagagatgttgccgcatgaacttcagttacagtcgccgttggttggtttatttgacctattactctcctaggtttctctataaacgatggtttaatttgtacattcttaaccatatatccaataaagctcaattcaggaacataaacaaattctttgttgaacgtttcaaagtcgaacgaagagtcacgaataacgatatcggatactggattgaaggttaccgttacggtaatttttgaatcggatagtttaagactgctgaatgtatcttccacatcaaacggagttttaatataaacgtatactgtagatggttctttaatagtgtcattaggagttaggccaatagaaatatcattaagttcactagaatatccagagtgtttcaaagcaattgtattattgatacaattattatataattcttcgccctcaatttcccaaataacaccgttacacgaagagatagatacgtgattaatacatttatatccaacatatggtacgtaactgaatcttcccatacctttaacttctggaagttccaaactcagaaccaaatgattaagcgcagtaatatactgatccctaatttcgaagctagcgatagcctgattgtctggaccatcgtttgtcataactccggatagagaaatatattgcggcatatacaaagttggaatttgactatcgactgcgaagacattagaccgtttaatagagtcatccccaccgatcaaagaattaatgatagtattattcattttctatttaaaatggaaaaagcttacaataaactccgtagagaaatatctataatttgtgagttttccttaaagtaacagcttccgtaaacgccgtctttatctcttagtaggtttattgtatttatgaccttttccttatcttcatagaatactaaaggcaacaaagaaatttttggttcttctctaagagctacgtgagacttaaccatagaagccaacgaatccctacatattttagaacagaaataccctacttcaccacccttgtatgtctcaatactaataggtctaaaaaccaaatcttgattacaaaaccaacacttatcaattacactatttgtcttaatagacacatctgccatagatttataatactttggtagtatacaagcgagtgcttcttctttagcgggcttaaagactgctttaggtgctgaaataaccacatctggaaggcttactcgcttagccatttaattacggaactatttttttatacttctaatgagcaagtagaaaacctctcatctacaaaaacgtactcgtgtccataatcctctaccatagttacacgttttttagatctcatatgtgctaaaaagttttcccatactaattggttactattatttttcgtataatttttaacagtttgaggttttagatttttagttacagaagtgatatcgaatattttatccaaaaagaatgaataattaattgtcttagaaggagtgttttcttggcaaaagaataccaagtgcttaaatatttctactacttcattaatcttttctgtactcagattcagtttctcatcttttacttgattgattatttcaaagactaacttataatcctttttatttattctctcgttagccttaagaaaactagatacaaaatttgcatctacatcatccgtggatatttgatttttttccatgatatccaagagttccgagataatttctccagaacattgatgagacaataatctccgcaatacatttctcaaatgaataagtttattagacacgtggaagtttgactttttttgtacctttgtacatttttgaaataccgactcgcaaaaaatacaatattcatatccttgttcagatactataccgttatgtctacaaccgctacataatcgtagattcatgttaacactctacgtatctcgtcgtccaatattttatataaaaacattttatttctagacgttgccagaaaatcctgtaatatttttagttttttgggctgtgaataaagtatcgccctaatattgttaccgtcttccgccaatatagtagttaaattatccgcacatgcagaagaacaccgcttaggcggattcagtacaatgttatatttttcgtaccaactcatttaaatatcataatctaaaatagttctgtaatatgtctagcgctaatatattgatcataatcctgtgcataaattaagatacaacaatgtctcgaaatcatcgacatggcttcttccatagttagaagatcgtcgtcaaagttagcaacgtgattcatcaacatttgctgttttgaggcagcaaatactgaaccgtcgccattcaaccattcataaaaaccatcgtctgaatccattgataatttcttgtactggtttttgagagctcgcatcaatctagcatttctagctcccggattgaaaacagaaagaggatcgtacatccagggtccattttctgtaaatagaatcgtataatgtcccttcaagaagatatcagacgatccacaatcaaagaattggtctccgagtttgtaacaaactgcggactttaacctatacatgataccgtttagcataatttctggtgatacgtcaatcggagtatcatctattagagatctaaagccggtgtaacattctccaccaaacatattcttattctgacgtcgttctacataaaacatcattgctccattaacgataacaggggaatgaacagcactacccatcacattagttcccaatggatcaatgtgtgtaactccagaacatcttccatagcctatgttaggaggagcgaacaccactcttccactattgccatcgaatgccatagaataaatatccttggaattgatagaaatcggactgtcggatgttgtgatcatcttcataggattaacaactatgtatggtgccgcctgaagtttcatatcgtaactgatgccgtttataggtctagccacagaaaccaacgtaggtctaaatccaactatagacaaaatagaagccaatatctgttcctcatctgtcataacttgagagcatccagtatgaataatcttcattagatggggatctaccgcatcatcatcgttacaataaaaaattcccattctaatgttcataattgcttttctaatcatggtatgcatgtttgctctctgaatctctgtggaaattagatctgatacacctgtaatcactatcggattatcctccgtaagacgattaaccaacaacatataattataagactttacttttctaaattcataaagttgctggattaggctataggtgtctccatgtacatacgcgttctcgagcgcaggaagtttaataccgaatagtgccatcagaataggatgaatatagtaattagtttctggttttctataaataaaagacaaatcttgtgaactagacatatcggtaaaatgcatggattggaatcgtgtagtcgacagaagaatatgatgattagatggagagtatattttatctaactctttgagttggtcaccgattctaggactagctcgagaatgaataagtactaaaggatgagtacatttcacagaaacactagcattgttcaatgtgctctttacatgggtaaggagttgaaatagctcgtttctatttgttctgacaatatttagtttattcataatgttaagcatatcctgaatagtaaagttagatgtgtcatacttgttagtagttagatatttagcaattgcattcccatcatttctcaatctcgtactccaatcatgcgtggatgctacttcgtcgatggaaaccatacaatcctttttgataggctgttgagattgatcatttcctgcacgtttaggtttggtacgttgatttctagcccctgcggatataaagtcatcgtctacaatttgggacaatgaattgcatacactacaagacaaagatttatcagaagtgtgaatatgatcttcatctaccaaagaaagagtttgattagtataactagattttagtcctgcgttagatgttaaaaaaacatcgctattgaccacggcttccattatttatattcgtagtttttactcgaaagcgtgattttaatatccaatcttattacttttggaatcgttcaaaacctttgactagttgtagaatttgatctattgccctacgcgtatactcccttgcatcatatacgttcgtcaccagatcgtttgtttcggcctgaagttggtgcatatctctttcaacattcgacatgagatccttaagggccatatcgtctagattttgttgagatgctgctcctggatttggattttgttgtgctgttgtacatactgtaccaccagtaggtgtaggagtacatacagtggccacaataggaggttgagaaagtgtaaccgttggagtagtacaagaaatacttccatccgattgttgtgtacatgtagttgttggtaacgtctgagaaggttgggtagatggcggcgtcgtcgttttttgatctttattaaatttagagataatatcctgaacagcattgctcggcgtcaacgctggaaggagtgaactcgccggcgcatcagtatcttcagacagccaatcaaaaagattagacatatcagatgatgtattagtttgttgtcgtggttttggtgtaggagcagtactactaggtagaagaataggagccgatgtagctgttggaaccggctgtggagttatatgaatagttggttgtagcggttggataggctgtctgctggcggccatcatattatctctagctagttgttctcgcaactgtctttgataatacgactcttgagactttagtcctatttcaatcgcttcatcctttttcgtatccggatccttttcttcagaataatagattgacgactttggtgtagaggattctgccagcctctgtgagaacttgttaaagaagtccatttaaggctttaaaattgaattgcgattataagattaaatggcagacacagacgatattatcgactatgaatccgatgatctcaccgaatacgaggatgatgaagaagaggaagaagatggagagtcactagaaactagtgatatagatcccaaatcttcttataagattgtagaatcagcatccactcatatagaagatgcgcattccaatcttaaacatatagggaatcatatatctgctcttaaacgacgctatactagacgtataagtctatttgaaatagcgggtataatagcagaaagctataacttgcttcaacgaggaagattacctctagtttcagaattttctgacgaaacgatgaagcaaaatatgctacatgtaattatacaagagatagaggagggttcttgtcctatagtcatcgaaaagaacggagaattgttgtcggtaaacgattttgacaaagatggtctaaaattccatctagactatattatcaaaatttggaaacttcaaaaacgatattagaatttatacgaatatcgttctctaaatgtcacaatcaagtctcgcatgttcagcaatttattgtcgtactttatatcgtgttcattaacgatatcttgcaaaatagtaatgattctatcttccttcgatagatattcttcagagattattgtcttatattctttcttgttatcagatatgaatttgataagactttgaacattattgatacccgtctgtttaattttttctacagatattttagttttggcagattctatcgtatctgtcaatagacatccaacatcgacattcgacgtcaattgtctataaatcaacgtataaattttagaaataacattagcgaattgttgtgcgttgatgtcgttattctgaaacagtatgattttaggtagcattttcttaacaaagagaacgtatttattgttactcagttgaacagatgatatatccagattactaacgcatctgattccgtataccaaactttcagaagaaatggtatacaattgtttgtattcattcaatgtctctttttcagaaattagtttagagtcgaatactgcaataattttcaagagatagttttcatcagataagattttatttagtgtagatatgataaaactattgttttgttggagaacttgatacgccgcgttctctgtagtcgacgctctcaaatgggaaacaatctccattatttttttggaatcggatactatatcttcggtatcttgacgcagtctagtatacatagagttaagagagattagagtttgtacattaagcaacatgtctctaaatgtggctacaaacttttcctttttcacatcatctagtttattatataccgatttcacaacggcaccagatttaaggaaccagaatgaaaaactctgataactacaatatttcatcatagttacgattttatcatcttctatagttggtgtaatagcgcatacctttttctccaagactggaaccaacgtcataaaaatgtttaaatcaaaatccatatcaacatctgatgcgctaagaccagtctcgcgttcaagattatctttactaatggtgacgaactcatcgtataaaactctaagtttgtccattatttatttacagatttagttgtttaatttatttgtgctcttccagagttgggatagtatttttctaacgtcggtattatattattaggatctacgttcatatgtatcataatattaatcatccacgttttgataaatctatctttagcttctgaaataacgtatttaaacaaaggagaaaaatatttagctacggcatcagacgcaataacattttttgtaaatgtaacgtatttagacgacagatcttcgttaaaaagttttccatctatgtagaatccatcggttgttaacaccattcccgcgtcagattgaataggagtttgaatagtttgttttggaaatagatccttcaataacttatagttgggtgggaaaaaatcgattttatcactagactctttcttttttactatcattacctcatgaactatttcttgaatgagtatatgtattttctttcctatatcggacgcgttcattggaaaatataccatgtcgttaactataagaatatttttatcctcgtttacaaactgaataatatcagatgtagttcgtaaacgaactatatcatcaccagcacaacatctaactatatgatatccactagtttcctttagccgtttattatcttgttccatattagcagtcattccatcatttaagaaggcgtcaaaaataatagggagaaatgacattttggattctgttacaactttaccaaaattaaggatatacggacttactatctttttctcaacgtcaatttgatgaacacacgatgaaaatgtgcttctatgagattgatcatgtagaaaacaacaagggatacaatatttccgcatatcatgaaatatattaagaaatcccaccttattatatttccccaaaggatccatgcacgtaaacattatgccgttatcattaataaagacttctttctcatcggatctgtaaaagttgttactgatttttttcattccaggatctagataattaataatgatgggttttctattcttattctttgtattttggcatatcctagaccagtaaacagtttccactttggtaaaatcagcagacttttgaacgctattaaacatggcattaatggcaataactaaaaatgtaaaatatttttctatgttaggaatatggtttttcactttaatagatatatggtttttggccaaaatgatagatatttttttatccgaggatagtaaaatattattagtcgccgtctctataaaaatgaagctagtctcgatatccaattttattctagaattgataggagtcgccaaatgtaccttatacgttatatctcccttgatgcgttccatttgtgtatctatatcggacacaagatctgtaaatagttttacgttattaatcatcacggtatcgccgtcgctagataacgctaatgtaccatccaagtcccaaatggagagatttaactgttcatcgtttagaataaaatgattaccggtcatattaataaagtgttcatcgtatctagataacaacgacttataattaatgtccaagtcttgaactcgctgaatgatcttttttaacccagttagttttagattggtacgaaatatattgttaaactttgattctacagtaatgtccaaatctagttgtggaaatacttccatcaacattgtttcaaacttgataatattattatctacatcttcgtacgatccaaattccggaatagatgtatcgcacgctctggccacccagataaccaaaaagtcacacgctccaggatatacattgtataaaaagctatcgttttttagtagggtttttttctgcgtgtatacgaagggattaaaaatagtattatcaacgtaactatattccaaattattcttatgagaatagataataatatcgtccttaatatctaacaaatttcctaaatatccctttaattgagtcattcgaagcgtcaatagaatatgtctcttaactatttccggctgttgtatatttaaatgacttcgtaaaaaataatatatgggcgacttctcatctatgtaatcatatggagtgagatatagggctcgttctacctcctgccccttacccacctgtaataccaattgcggacttactatatatcgcatatttatatcgtggggtaaagtgaaaatctactaccgatgatgtaagtcttacaatgttcgaaccagtaccagatcttaatttggaggcctccgtagaactaggggaggtaaatatagatcaaacaacacctatgataaaggagaatagcggttttatatcccgcagtagacgtctattcgcccatagatctaaggatgatgagagaaaactagcactacgattctttttacaaagactttattttttagatcatagagagattcattatttgttcagatgcgttgacgctgtaaaagacgtcactattaccaaaaaaaataacattatcgtggcgccttatatagcacttttaactatcgcatcaaaaggatgcaaacttacagaaacaatgattgaagcattctttccagaactatataatgaacatagtaagaaatttaaattcaactctcaagtatccatcatccaagaaaaactcggataccagtttggaaactatcacgtttatgattttgaaccgtattactctacagtagctctggctattcgagatgaacattcatctggcatttttaatatccgtcaagagagttatctggtaagttcattatctgaaataacatatagattttatctaattaatctaaaatctgatcttgttcaatggagtgctagtacgggcgctgtaattaatcaaatggtaaatactgtattgattacagtgtatgaaaagttacaactggtcatagaaaatgattcacaatttacatgttcattggctgtggaatcaaaacttccaataaaattacttaaagatagaaatgaattatttacaaaattcattaacgagttaaaaaagaccagttcattcaagataagcaaacgcgataaggatacgctactaaaatattttacttaggactggagttagaatttatagacgactcatttcgtttatcattgttactattattactattactatcattattagtgttggcattattagtattcttcttgtcatcttgttcagaaatatacagcaatgctatacctaatactaaatacattatcatgctcgcaatggctctaacaacaacgaaccaaaatgaatttggtcgtagcttttgttcacaaaaatacataaagaaatgtctacataaatctatggcgccattggctacttgaaatagcgccagtcctcctacagattttaatatagctgtataacatgacatttattcatcatcaaaagagacagagtcaccatctgtcatatttagattttttttcatgtgttcaaagtatcctctactcatttcattataatagtttatcatacttagaattttaggacggatcaatgagtaagacttgactagatcgtcagtagtaatttgtgcatcgtctattctgcatccgcttcgtcgaataatgtatagcatcgctttgagattctccatagctatcaagtctttatacaatgacatggaaatatctgtgaatactttatacttctccaacatcgatgccttaacatcatcgcctactttagcattgaaaatacgttctattgtgtagatggatgtagcaagatttttaaacaacaatgccatcttacacgatgattgcctcaagtctccaatcgtttgtttagaacgattagctacagagtccaatgcttggctgactagcatattattatctttagaaattgtattcttcaatgaggcgtttatcatatctgtgatttcgttagtcatattacagtctgactgggttgtaatgttatccaacatatcacctatggatacggtacacgtaccagcatttgtaataatcctatctaagatgttgtatggcattgcgcagaaaatatcttctcctgtaatatctccactctcgataaatctactcagattattcttaaatgccttattctctggagaaaagatatcagtgtccatcatttcattaatagtatacgcagaaaagataccacgagtatcaattctatccaagatacttatcggttccgagtcacagataatggtttcctctccttcgggagatcctgcatagaaatatctaggacaatagtttctatactgtctgtaactctgataatctctaaagtcactaactgataccatgaaattgagaagatcaaacgctgaagtaattaatttttctgcctcgtttttactacaactagttttcatcaatgtagtgacgatgtattgtttagttacttttggtctaatactgatgatagagatattattgcttcccataatggatcttctagtagtcaccttaaagcccattgatgcgaatagcagatagataaagtcttggtatgactcctttctaatatagtacggactacctttgtcacccaactttatacccacataagccataacaacctctttaatagccgtttcatgaggtttatcagccatgagcctgagtagttggaagaatctcatgaatcccgtctcagaaagtcctatatgcatgatagatttatctttcctgggaaactctcgtatagtcatagatgaaatactctttaaagtttctgaaataagattagtaacagtcttacctccgactactctaggtaacaaacaaactctaataggtgttttctctgcggagataatatcagaaaggatagagcaataagtagtattattgtgattataaagaccgaatacataacaggtagaatttataaacatcatgtcctgaaggtttttagacttgtattcctcgtaatccataccgtcccaaaacatggatttggtaactttgatagccgtagatctttgttccttcgccaacaggttaaagaaattaataaagaatttgttgtttctatttatgtccacaaattgcacgtttggaagcgccacggttacattcactgcagcattttgaggatcgcgagtatgaagtacgatgttattgtttactggtatatctggaaagaaatctaccagtctaggaataagagattgatatcgcatagaaatagtaaagtttataatctcatcatcgaagagcattttgttaccattgtaataaatatccactctgtcatatgtataaatgaagtactgttcaaacatgatgagatgtttatatgttggcatagtagtgagatcgacgtttggtaatggcaatgtattaagattaactccataatgtctagcagcatctgcgatgttataagcgtcgtcaaagcggggtcgatcttgtattgttatatattgtctaacacctataagattatcaaaatcttgtctgcttaatacaccgttaacaatttttgccttgaattcttttattggtgcattaataacatccttatagaggatgttaaacaaataagtgttatcaaagttaagatctggatatttcttttctgctagaacatccattgagtcggagccatctggtttaatataaccaccgataaatctagctctgtattctgtatccgtcaatctaatattaagaaggtgttgagtgaaaggtggaagatcgtaaaagctgtgagtattaatgataggattagtttccgaactaatgttaattggggtattaataatatctatatttccagcgttaagtgtaacattaaacagttttaattcacgtgacgtggtatcaattaaataattaatgcccaatttggatatagcagcctgaagctcatcttgtttagttacggatcctaatgagttattaagcaatatatcgaacggatgaacgaaggttgttttaagttggtcacatactttgtaatctagacatagatgcggaagaacggtagaaactatacgaaataaatattcagagtcctctaattgatcaagagtaactattgacttaataggcatcatttatttagtattaaatgacgaccgtaccagtgacggatatacaaaacgatttaattacagagttttcagaagataattatccatctaacaaaaattatgaaataactcttcgtcaaatgtctattctaactcacgttaacaacgtggtagatagagaacataatgccgccgtagtgtcatctccagaggaaatatcctcacaacttaatgaagatctatttccagatgatgattcaccggccactattatcgaacgagtacaacctcatactactattattgacgatactccacctcctacgtttcgtagagagttattaatatcggaacaacgtcaacaacgagaaaaaagatttaatattacagtatcgaaaaatgctgaagcaataatggaatctagatctatgataacttctatgccaacacaaacaccatccttgggagtagtttatgataaagataaaagaattcagatgttagaggatgaagtggttaatcttagaaatcaacgatctaatacaaaatcatctgataatttagataattttaccaaaatactatttggtaagactccgtacaaatcaacagaagttaataagcgtatagccatcgttaattatgcaaatttgaacgggtcccccttatcagtcgaggacttggatgtttgttcggaggatgaaatagatagaatctataaaacgattaaacaatatcacgaaagtagaaaacgaaaaattatcgtcactaacgtgattattattgtcataaacattatcgagcaggcattgctaaaactcggatttgaagaaatcaaaggactgagtaccgatatcacttcagaaattatcgatgtggagatcggagatgactgcgatgctgtagcatctaaactaggaatcggtaacagtccggttcttaatattgtattgtttatactcaagatattcgttaaacgaattaaaattatttaatttaatacattcccatatccagacaacaatcgtctggattaatctgttcctgtcgtctcataccggacgacatattaatctttttattagtgggcatctttttagatggtttctttttcccagcattaactgagtcgatacctagaagatcgtgattgatctctccgaccattccacgaacttctaattggccgtctctgacggtaccataaactattttaccagcattagtaacagcttggacaatctgaccatccatcgcattgtacgatgtagtagtaactgttgttctacgtctaggagcaccagaagtatttttggagcccttggatgttgatgtagaagaagacgaggattttgattttggtttacatgtaatacattttgaactctttgattttgtatcacatgcgccggcagtcacatctgtttgagaattaagattattgttgcctcctttgacggctgcatctccaccgatttgcgctagtagatttttaagctgtggtgtaatcttattaactgtttcgatataatcatcgtaactgcttctaacggctaaattttttttatccgccatttagaagctaaaaatatttttatttatgcagaagatttaactagattatacaatgaactaatatgatccttttccagattatttacaaacttggtattttttggttctggaggaggcgaatttaaattcggacttggattcggattttgtaagttcttgatcttattatacatcgagtataggatggcgacagtaactgctacacaaataccgatcaaaagaagaataccaatcatttattgacaataacttcactattgatcaagtatgcaatatatcatcttttcactaaataagtagtaataatgattcaacaatgtcgagatatatggacgataataatttagttcatggaaatatcgctatgattggtgtgaatgactccgctaactctgtggggtgcgcagtgctttccccacatagaataaattagcattccgactgtgataataataccaagtataaacgccataatactcaatactttccatgtacgagtgggactggtagacttactaaagtcaataaaggcgaagatacacgaaagaatcaaaagaatgattccagcgattagcacgccggaaaaataatttccaatcataagcatcatgtccatttaactaataaaaattttaaatcgccgaatgaacaaagtggaatataaaccatataaaaacaatagtttgtactgcaaaaataatatctatttttgttttcgaagatatggtaaaattaaatagtagtacacagcatgttataactaacagcagcaacggctcgtaattacttatcatttactagacgaaaaggtggtgggatattttcttgctcaaataatacgaatatatcacccatccattttatgcgatgtttatatactctaatctttaatagatctatagacgacgggtttaccaacaatatagattttatcgattcatctaatttaaacccttccttaaacgtgaatgatctattatctggcataacgatgaccctacctgatgaatcggacaatgtactgggccatgtagaataaattatcaacgaattatcgtctacgaacatttatatcatttgttttaattttaggacgcgaataaatggatataaaatagaaaataacagatattacaaccagtgttatggccgcgcccaaccaggtaggcagttttattttatcttttactacaggttctcctggatgtacgtcaccaacggcggacgtagttctagtacaattagacgtaagttccgcttgggaattttttaacgctaaagagttaacgttaatcgtgcacccaacgtatttacatctagttcgttgaacatcttgattataatataaccattttctatctctagattcgtcagtgcactcatgtaaccaacataccctaggtcctaaatatttatctccggaattagattttggataattcgcgcaccaacaatttctatttcctttatgatcgttacaaaagacgtataatgccgtatccccaaaagtaaaataatcaggacgaataattctaataaactcagaacaatatctcgcatccatatgtttggagcaaatatcggaataagtagacatagccggtttccgttttgcacgtaaccattctaaacaattggggtttccaggatcgtttctacaaaatccagtcatgaaatcgtcacaatgttctgtcttgtaattattattaaatatttttggacagtgtttggtatttgtcttagaacaacattttgccacgctatcactatcgcccaggagataatccttttttataaaatgacatcgttgcccggatgctatataatcagtagcgtgttttaaatccttaatatattcaggagttacctcgttctgataatagattaatgatccaggacgaaatttgaaagaactacatggttctccatgaattaatacatattgtttagcaaattcaggaactataaaactactacaatgatctatcgacataccatctatcaaacaaaacttgggtttaatttctcccggagatgtttcataatagtacgtataactttcttctgcaaacttaacagctctattatattcaggataattaaaacctaattccatatatttgtctcgtatatctgctattcctggtgctattttgattctattaagagtaacagctgcccccattcttaataatcgtcagtatttaaactgttaaatgttggtatatcaacatctaccttatttcccgcagtataaggtttgttgcaggtatactgttcaggaatggttacatttatacttcttctatagtcctgtctttcgatgttcatcacatatgcaaagaacagaataaacaaaataatgtaagaaataatattaaatatctgtgaattcgtaaatacattgattgccataataattacagcagctacaatacacacaatagacattcccacagtgttgccattacctccacgatacatttgagttactaagcaataggtaataactaagctagtaagaggcaatagaaaagatgagataaatatcatcaatatagagattagaggagggctatatagagccaagacgaacaaaatcaaaccgagtaacgttctaacatcattatttttgaagattcccaaataatcattcattcctccataatcgttttgcatcatacctccatctttaggcataaacgattgctgctgttcctctgtaaataaatctttatcaagcactccagcacccgcagagaagtcgtcaagcatattgtaatatcttaaataactcatttatatattaaaaaatgtcactattaaagatggagtataatctttatgccgaactaaaaaaaatgacttgtggtcaacccctaagtctttttaacgaagacggggatttcgtagaagttgaaccgggatcatcctttaagtttctgatacctaagggattttacgcctctccttccgtaaagacgagtctagtattcgagacattaacaacgaccgataataaaatcactagtatcaatccaacaaatgcgccaaagttatatcctcttcaacgcaaagtcgtatctgaagtagtttctaatatgaggaaaatgatcgaatcaaaacgtcctctatacatcactcttcacttggcgtgtggatttggtaagactattaccacgtgttatcttatggctacacacggtagaaaaaccgtcatttgcgtacccaataaaatgttaatacatcaatggaagacacaggtagaggcagtcggattggaacataagatatccatagatggagtaagtagtctattaaaggaactaaagactcaaagtccggatgtattaatagtagtcagtagacatctgacaaacgatgccttttgtaaatatatcaataagcattatgatttgttcatcttggatgaatcacatacgtataatctgatgaacaatacagcagttacaagatttttagcgtattatcctccgatgatgtgttattttttaactgctacacctagaccatctaaccgaatttattgtaacagtattattaatattgccaagttatccaatctaaaaaaaactatctatgcagtagatagtttttttgagccatattccacagataatattagacatatggtaaaacgactagatggaccatctaataaatatcatatatataccgagaagttattatctgtagacgagcctagaaatcaacttattcttgataccctggtagaagaattcaagtcaggaactattaatcgcattttagttattactaaactacgtgaacatatggtattattctacaaacgattattagattttttcggaccagaggttgtatttataggagacgcccaaaatagacgtactccagatatggtcaaatcaatcaaggaactaaatagatttatattcgtatccaccttattttattccggtactggtttagatattcctagtttggattcgttgttcatttgctcggcagtaatcaacaatatgcaaatagagcaattactagggagggtatgtcgagaaacagaactattagataggacggtatatgtatttcctaacacatccatcaaagaaataaagtacatgataggaaatttcatgcaacgaattattagtctgtctgtagataaactaggatttaaacaaaaaagttatcggaaacatcaagaatccgatcccacttctgcatgtacaacatcatccagagaagaacgtgtattaaatagaatatttaactcgcaaaatcgttaagaagtttaagcgacgatccgcatgctgcgcaggccagtgtattacccctcatagtattaatataatccaatgatacttttgtgatgtcggaaatcttaaccaatttagactgacaggcagaacacgtcatgcaatcatcatcgtcatcgataactgtagtcttgggcttctttttgcgactcttcattccggaacgcacattggtgctatccatttaggtagtaaaaaataagtcagaatatgccctataacacgatcgtgcaaaacctggtatatcgtctctatctttatcacaatatagtgtatcgacatttttattattattgacctcgtttatcttggaacatggaatgggaacatttttgttatcaacggccatctttgccttaattccagatgttgtaaaattataactaaacagtctatcatcgacacaaatgaaattcttgtttagacgtttgtagtttacgtatgcggctcgttcgcgtctcattttttcagatattgcaggtactataatattaaaaataagaatgaaataacataggattaaaaataaagttatcatgacttctagcgctgatttaactaacttaaaagaattacttagtctgtacaaaagtttgagattttcagattctgcggctatagaaaagtataattctttggtagaatggggaacatctacttactggaaaataggcgtgcaaaaggtagctaatgtcgagacgtcaatatctgattattatgatgaggtaaaaaataaaccgtttaatattgatccgggctattacattttcttaccggtatattttgggagcgtctttatttattcgaagggtaaaaatatggtagaacttggatctggaaactcttttcaaataccagatgatatgcgaagtgcgtgtaacaaagtattagacagcgataacggaatagactttctgagatttgttttgttaaacaatagatggataatggaagatgctatatcaaaatatcagtctccagttaatatatttaaactagctagtgagtacggattaaacatacccaaatatttagaaattgaaatagaggaagacacattatttgacgacgagttatactctattatagaacgctctttcgatgataaatttccaaaaatatccatatcgtatattaagttgggagaacttagacggcaagttgtagactttttcaaattctcattcatgtatattgagtccatcaaggtagatcgtataggagataatatttttattcctagcgttataacaaaatcaggaaaaaagatattagtaaaagatgtagaccatttaatacgatccaaggttagagaacatacatttgtaaaagtaaaaaagaaaaacacattttccattttatacgactatgatggaaacggaacagaaactagaggagaagtaataaaacgaattatagacactataggacgagactattatgttaacggaaagtatttctctaaggttggtagtgcaggcttaaagcaattgactaataaattagatattaatgagtgcgcaactgtcgatgagttagttgatgagattaataaatccggaactgtaaaacgaaaaataaaaaaccaatcagcatttgatttaagcagagaatgtttgggatatccagaagcggattttataacgttagttaataacatgcggttcaaaatagaaaattgtaaggttgtaaatttcaatattgaaaatactaattgtttaaataacccgagtattgaaactatatatggaaactttaaccagttcgtctcaatctttaatgtcgtcaccgatgtcaaaaaaagattattcgagtgaaataatatgcgcctttgatataggtgcaaaaaatcctgccagaactgttttagaagtcaaggataactccgttagggtattggatatatcaaaattagactggagttctgattgggaaaggcgcatagctaaagatttgtcacaatatgaatacactacagttcttctagaacgtcagcctagaaggtcgccgtatgttaaatttatctattttattaaaggctttttatatcatacatcggctgccaaagttatttgcgtctcgcctgtcatgtctggtaattcatatagagatcgaaaaaagagatcggtcgaagcatttcttgattggatggacacattcggattgcgagactccgttccggatagacgcaaattagacgatgtagcggatagtttcaatttggctatgagatacgtattagataaatggaatactaattatacaccttataataggtgtaaatctagaaattacataaaaaaaatgtaataacgttagtaacgccattatggataatctatttacctttctacatgaaatagaagatagatatgccagaactatttttaactttcatctaataagttgcgatgaaataggagatatatatggtcttatgaaagaacgcatttcctcagaggatatgtttgataatatagtgtataataaagatatacatcctgccattaagaaactagtgtattgcgacatccaacttactaaacacattattaatcagaatacgtatccggtatttaacgattcttcacaagtgaaatgttgtcattatttcgacataaactcagataatagcaatattagctctcgtacagtagagatatttgagagggaaaagtcatctcttgtatcatatattaaaactaccaataagaagagaaaggtcaattacggcgaaataaagaaaactgttcatggaggcactaatgcaaattacttttccggtaaaaagtctgacgagtatctgagtactacagttagatccaacattaatcaaccttggatcaaaaccatctctaagaggatgagagttgatatcattaatcactctatagtaacgcgtggaaaaagctctatattacaaactatagaaattatttttactaatagaacatgtgtgaaaatattcaaggattctactatgcacattattctatccaaggacaaggatgaaaaggggtgtatacacatgattgacaaattattctatgtctattataatttatttctgttgttcgaagatatcatccaaaacgagtactttaaagaagtagctaatgttgtaaaccacgtactcacggctacggcattagatgagaaattattcctaattaagaaaatggctgaacacgatgtttatggagttagcaatttcaaaatagggatgtttaacctgacatttattaagtcgttggatcataccgttttcccctctctgttagatgaggatagcaaaataaagttttttaaggggaaaaagctcaatattgtagcattacgatctctggaggattgtataaattacgtgactaaatccgagaatatgatagaaatgatgaaggaaagatcgactattttaaatagcatagatatagaaacggaatcggtagatcgtctaaaagaattgcttctaaaatgaaaaaaaacactaattcagaaatggatcaacgactagggtataagtttttggtgcctgatcctaaagccggagttttttatagaccgttacatttccaatatgtatcgtattctaattttatattgcatcgattgcatgaaatcttgaccgtcaagcggccactcttatcgtttaagaataatacagaacgaattatgatagaaattagcaatgttaaagtgactcctccagattactcacctataatcgcgagtattaaaggtaagagttatgacgcattagccacgttcactgtaaatatctttaaagaggtaatgaccaaagagggtatatccatcactaaaataagtagttatgagggaaaagattctcatttgataaaaattccgctactaataggatacgggaataaaaatccacttgatacagccaagtatcttgttcctaatgtcataggtggagtctttatcaataaacaatctgtcgaaaaagtaggaattaatctagtagaaaagattacaacatggccaaaatttagggttgttaagccaaactcattcactttctcgttttcctccgtatcccctcctaatgtattaccgacaagatatcgccattacaagatatctctggatatatcacaattggaagcgttgaatatatcatcgacaaagacatttataacggtcaatattgttttgctgtctcaatatttatctagagtgagtctagaattcattagacgtagtttatcatacgatatgcctccagaagttgtctatctagtaaacgcgataatagatagtgctaaacgaattactgaatctattactgactttaatattgatacatacattaatgacctggtggaagctgaacacattaaacaaaaatctcagttaacgatcaacgagttcaaatatgaaatgctgcataactttttacctcatatgaactatacacccgatcaactaaagggattttatatgatatctttactaagaaagtttctctactgtatcttccacacttctagatatccagatagagattcgatggtttgtcatcgcatcctaacgtacggcaaatattttgagacgttggcacatgatgaattagagaattacataggcaacatccgaaacgatatcatgaacaatcacaagaacagaggcacttacgcggtaaacattcatgtactaacaactcccggacttaatcacgcgttttctagcttattgagtggaaagttcaaaaagtcagacggtagttatcgaacacatcctcactattcatggatgcagaatatttctattcctaggagtgttggattttatccggatcaagtaaagatttcaaagatgttttctgtcagaaaataccatccaagtcaatatctttacttttgttcatcagacgttccggaaagaggtcctcaggtaggtttagtatctcaattgtctgtcttgagttccattacaaatatactaacgtctgagtatttggatttggaaaagaaaatttgtgagtatatcagatcatattataaagatgatataagttactttgaaacaggatttccaatcactatagaaaatgctctagtcgcatctcttaatccaaatatgatatgtgattttgtaactgactttagacgtagaaaacggatgggattcttcggtaacttggaggtaggtattactttagttagggatcacatgaatgaaattcgcattaatattggagcgggaagattagtcagaccattcttggttgtggataacggagagctcatgatggatgtgtgtccggagttagaaagcagattagacgacatgacattctctgacattcagaaagagtttccgcatgtcatcgaaatggtagatatagaacaatttacttttagtaacgtatgtgaatcggttcaaaaatttagaatgatgtcaaaggatgaaagaaagcaatacgatttatgtgactttcctgccgaatttagagatggatatgtagcatcttcattagtgggaatcaatcacaattctggacccagagctattcttggatgtgctcaagctaaacaagctatctcttgtctgagctcggatatacgaaataaaatagacaatggaattcatttgatgtatccagagaggccaatcgtgattagtaaggctttagaaacttcaaagattgcggctaattgcttcggccaacatgttactatagcattaatgtcgtacaaaggtatcaatcaagaggatggaattatcatcaaaaaacaatttattcagagaggcggtctcgatattgttacagccaagaaacatcaagtagaaattccattggaaaactttaataacaaagaaagagataggtctaacgcctattcaaaattagaaagtaatggattagttagactgaatgctttcttggaatccggagacgctatggcacgaaatatctcatcaagaactcttgaagatgattttgctagagataatcagattagcttcgatgtttccgagaaatataccgatatgtacaaatctcgcgttgaacgagtacaagtagaacttactgacaaagttaaggtacgagtattaaccatgaaagaaagaagacccattctaggagacaaatttaccactagaacgagtcaaaagggaacagtcgcgtatgtcgcggatgaaacggaacttccatacgacgaaaatggtatcacaccagatgtcattattaattctacatccatcttctctagaaaaactatatctatgttgatagaagttattttaacagccgcatattctgctaagccgtacaacaataagggagaaaaccgacctgtctgttttcctagtagtaacgaaacatccatcgatacatatatgcaattcgctaaacaatgttatgagcattcaaatccgaaattgtccgatgaagaattatcggataaaatcttttgtgaaaagattctctatgatcctgaaacggataagccttatgcatccaaagtattttttggaccaatttattacttgcgtctgaggcatttaactcaggacaaggcaaccgttagatgtagaggtaaaaagacgaagctcattagacaggcgaatgagggacgaaaacgtggaggaggtatcaagttcggagaaatggagagagactgtttaatagcgcatggtgcagccaatactattacagaagttttgaaagattcggaagaagattatcaagatgtgtatgtttgtgaaaattgtggagacatagcagcacaaatcaagggtattaatacatgtcttagatgttcaaaacttaatctctctcctctcttaacaaaaattgataccacgcacgtatctaaagtatttcttactcaaatgaacgccagaggcgtaaaagtcaaattagatttcgaacgaaggcctccttcgttttataaaccattagataaagttgatctcaagccgtcttttctggtgtaatattctagtttggtagtagatacatatcaatatcatcaaattcgagatccgaattataaaatgggcgtggattgttaactatagaatcggacgtctgatattcgaaaatctgtggagtttcaggttttggtggaggtgtaactgctacttgggatactgaagtctgatattcagaaagctgtggatgttctggttcggcatccaccgatggtgtcacatcactaatcggttcggtaacgtctgtggatggaggtgctacttctacagaacctgtagcctcagttgtcaacggagatacatttttaatgcgagaaaatgtataatttggtaatggtttcttatgtggatctgaagaagaggtaagatatctactagaaagataccgatcacgttctagttctcttttgtagaacttaactttttctttctccgcatctagttgatattccaacctcttcacgttactacgttcagattccaattcacgttcgcatgggttacctccgcagtttttacgagcgatttcacgttcagccttcatgcgtctctccctctctctatcgagtttatcagagcagtctttctgaaggcgatcgaactccataaatttctccaacgctttgattgtttccatagatttccgaagttcagcttttaggactgtgattctttttctttcgaattcacagctggatgtacaaccgtttccattaccgccatctctaagtttcttttctagatcggcaacatttcatccccatgccttttacattcctcgagtctactgtcgtcgaaatatcgttccagctccttttcgacatcaataactttagcacgttgtctctcaagctctcttttgtagttatctgattccctggcacgtttaagatcttcatgcaattgagtcagctcttaacttcctctcttgcttcttcgtcatagtacgcgcaatcactgtgagatccattgttaccacgtctacactcggcgagctcgcgtttaagagattcaatttcccgtttgtattggtccatgtttccattgctaccaccattagatttacaggctgctagttgtcgttcgagatcagaaatacgggttttcttggaattgatttcgtcgatgtacttggcatcgaaacacttattaagttctttttccaattctacgattttatttctttcgcgagtcaattccctcctgtagtaactatctgttttgtcagattcacgctctctacgtagactttcttgcaagttactaatttgttccctagcacgtccgagtttagttttatatgctgaatagagttctgattcatcctttgagcagatctctagcgatcgtttaagattcctaattctagtctttagcctatttacctcctcagaagatgttccgttaccgttgcgtttacactcgttaagctgtctatcaagatccatgattctatctctaagacgttgcatctctctttccatatcagcattgctttcattattacgtctgcagtcactcaactgtctttcaatatctgagattctatctctaagacgtcgcatctctctctgtttcggcattggtttcattattacgtttacagtcgttcaactgtctttcaagatctgatattctagattggagtctgctaatctctgtagcattttcacggcattcactcagttgtctttcaagatctgaaattttagattggagtctgctaatctctgtaagatttcctcctccgctctcgatgcagtcggtcaacttattctctagttctctaatacgcgaacgcagtgcatcaacttcttgcgtgtcttcctggttgcgtgtacattcatcgagatctctaacgcgtcgtcgttcttcctcaagttctctgcgtactacagaaagcgtgtccctatcttgttgatatttagcaatttctgattctagagtactgattttgcttacgtagttactaatagttgtcttggccttatcaagatcctccttgtatttgtcgcattccttgatatccctacgaagtctggacagttcccattcgacattacgacgtttatcgatttcagctcggagatcgtcatcgcgttgttttagccacatacgactgagttcaagttctcgttgacaagatccatctacttttccattcctaatagtatccagttccttttctagttctgaacgcatttctcgttccctatcaagcgattctctcaattctcggatagtcttcttatcaatttctaataaatctgaaccatcatctgtcccattttgaatatccctgtgttctttgatctcttttgtaagtcggtcgattctttcggttttataaacagaatccctttccaaagtcctaatcttactgagtttatcactaagttctgcattcaattcggtgagttttctcttggcttcttccaactctgttttaaactctccactatttccgcattcttcctcgcatttatctaaccattcaattagtttattaataactagttggtaatcagcgattcctatagccgttcttgtaattgtgggaacataattaggatcttctaatggattgtatggcttgatagcatcatctttatcattattagggggatggacaaccttaattggttggtcctcatctcctccagtagcgtgtggttcttcaataccagtgttagtaataggcttaggcaaatgcttgtcgtacgcgggcacttcctcatccatcaagtatttataatcgggttctacttcagaatattcttttctaagagacgcgacttcgggagttagtagaagaactctgtttctgtatctatcaacgctggaatcaatactcaagttaaggatagcgaatacctcatcgtcatcatccgtatcttctgaaacaccatcatatgacatttcatgaagtctaacgtattgataaatagaatcagatttagtattaaacagatccttaacctttttagtaaacgcatatgtatattttagatctccagatttcataatatgatcacatgccttaaatgtcagtgcttccatgatataatctggaacactaatgggtgacgaaaaagatacagcaccatatgctacgttgataaataaatctgaaccactaagtagataatgattaatgttaagaaagaggaaatattcagtgtataggtatgtcttggcgtcatatcttgtactaaacacgctaaacagtttgttaatgtgatcaatttccaatagattaattagagcagcgggaataccaacaaacatattaccacatccgtattttctatgaatatcacatatcatgttaaaaaatcttgatagaagagcgaatatctcgtctgacttaatgagtcgtagttcagcagcaacataagtcataactgtaaatagaacatactttcctgtagtgttgattctagactccacatcaacaccattattaaaaatagttttatatacatctttaatctgctctccgttaatcgtcgaacgttctagtatacggaaacactttgatttcttatctgtagttaatgacttagtgatatcacgaagaatattacgaattacatttcttgtttttcttgagagacctgattcagaactcaactcatcgttccatagtttttctacctcagtggcgaaatctttggagtgcttggtacatttttcaataaggttcgtgacctccatttattataaaaaatttattcaaaacttaactacaatcgggtaattataagatcgtagatctcccatgtggcggaatactaccatctatcgcatgtggatggacagtaggtaatggccatgggaacagtaatgtttgcatatttatctttcttgctagtattactgcatattgtcccaatgtttcgatgtgatgttctaacctatcaactgccgctgtatcacaacaatagtgtccgatgaaattaagattatgatccaatgtgtttaatatatgattatcaagtcttatacgatccgcgtcttttttgacaggatcaggttcttctacaggaagaagtttcggcctcttatgatattcatgtctgggaaacggtggtctagggtgaggctccggtatcggagtgggttttggattataatcatcatcgtctatgacatcatcttcgacttcgatatttattttgctatcttgatgatgtcctgtatcagttgcattttcagcactcgactgaatattagcgcattcattgtctattattaccatatttctaaacccaaaatgtatgtgttgaacatcagtactatcgttgatgagtcttatagcatgaattcgcttatcgttatcgggtttatcttctgtcaccttagcaattccttttttattaaactctacataatcatatccatttctattgtttgttctaatataaacgagtatagcatcattgctaaatttttcaatagtatcaaaaacagaatatcctaaaccatataatatatattcaggaacactcaaactaaatgtccaggattctcctaaatacgtaaactttaatagtgcgaaatcattcaaaaatctaccacttatagatagatagtacataaatgcgtatagtagtctacctatctctttattatgaaaaccggcattacgatcatatatgtcgtgatatacctgtgatccgtttacgttaaaccataaatacatgggtgatcctataaacatgaatttatttctaattctcagagctatagttaattgaccgtgtaatatttgcttacatgcatacttgatacgcttattaataagatttttatcattgctcgttatttcagaatcgtatatataaggagtaccatcgtgattcttaccagatattatacaaaatactatatataaaatatattgacccacgttagtaatcatataaatgtttaacgttttaaattttgtattcaatgatccattatcatacgctatcatggtcttgtaatattcattctttaaaatataatattgtgttagccattgcattggagctcctaatggagattttctattctcatccattttaggataggctttcataaagtccctaataacttcgtgaataatgtttctatgttttctactgatgcatgtatttgcttcgatttttttatcccatgtttcatctatcatagatttaaacgcagtaatgctcgcaacattaacatcttgaaccgttggtacaattccgttccataaatttataatgttcgccatttatataactcattttttgaatatacttttaattaacaaaagagttaagttactcatatggacgccgtccagtctgaacatcaatctttttagccagagatatcatagccgctcttagagtttcagcgtgattttccaacctaaatagaacttcatcgttgcgtttacaacacttttctatttgttcaaactttgttgttacattagtaatctttttttccaaattagttagccgttgtttgagagtttcctcattgtcgtcttcatcggctttaacaattgcttcgcgtttagcctctggctttttagcagcctttgtagaaaaaaattcagttgctggaattgcaagatcgtcatctccggggaaaagagttccgtccatttaaagtacagattttagaaactgacactctgcgttatttatatttggtacaacacatggattataaatattgatgttaataacatcagaaaatgtaaagtctatacattgttgcatcgtgttaaattttctaatggatctagtattattgggtccaacttctgcctgaaatccaaatatggaagcggatacaaaaccgtttcctggataaaccacacatctccacttttgctttacatcagaaattgtgtcgttgacatcttgaactctcctatctaatgccggtgttccacctatagattttgaatattcgaatgctgcatgagtagcattaaattccttaatattgccataattttcatatattgagtaaccctggataaaaagtaaacacaccgcagccgtcgctaccacaataaaaaaaattgatagagagttcatttataatctattagaagctgacaaaatttttttacacgcatcagacaatgctttaataaatagttcaacatctacttttgtcatatcgaaccgatggtatgattctaacctagaattacatccgaaaaagttgactatgttcatagtcattaagtcattaacaaacaacattccagactctggattataagacgatactgtttcgtcacaattacctaccttaatcatgtgattatgaatattggctattagagcaccttctaagaaatctataatatctttgaaacacgatttaaaatcaaaccacgaatatacttctacgaagaaagttagtttacccataggagaaataactataaatggagatctaaatacaaaatccggatctatgatagttttaacattattatattctctattaaatacctccacatctaaaaatgttaattttgaaactatgtcttcgtttattaccgtacctgaactaaacgctataagctctattgtttgagaactctttaaacgatattcttgaaatacatgtaacaaagtttcctttaactcggtcggtttatctaccatagttacagaatttgtatccttatctataatataataatcaaaatcgtataaagttatataattatcgcgttcagattgtgatcttttcaaatagactaaaaaccccatttctctagtaagtatcttatgtatatgtttgtaaaatatcttcatggtgggaatatgctctaccgcagttagccattcctcattgacagcggtagatgtattagacaaaactattccaatgtttaacaagggccattttacgagattattaaatccttgtttgataaatgtagccaatgagggttcgagttcaacgacgattgaattctcttcccgcggatgctgcatgatgaacgacgggatgttgttcgattgatttggaattctttttcgactttttgtttatattaaatattttaaaatttatagcggatagcaattcatgtaccacggataatgtagacgcgtattgcgcatcgatatctttattattagataaatttatcaataaatgtgagaagtttgcctcgttaaggtcttccatttaaatattatataaacatttgtgtttgtatcttattcgtcttttatggaatagttttttactagtaaagctgcaattacacactttgtccgtaaaacataaatataaacaccagcttttatcaatcgttccaaaaagtcgacggcggacatttttaacatggcatctattttaaatacacttaggtttttggaaaaaacatcattttataattgtaacgattcaataactaaagaaaagattaagattaaacataagggaatgtcatttgtattttataagccaaagcattctaccgttgttaaatacttgtctggaggaggtatatatcatgatgatttggttgtattggggaaggtaacaattaataatctaaagatgatgctattttacatggatttatcatatcatggagtgacaagtagtggagcaatttacaaattgggatcgtctatcgatagactttctctaaataggactattgttacaaaagttaataattatgatgatacattttttgacgacgatgattgatcgctattgcacaattttgtttttgtactttctaatatagtgtttaggttctttttcatatgagaatattgatttactaaaatatctatgtttaacttttgttctatgacgtccttatcggcggtatcggtacatatacgtaattcaccttcacaaaatacggagtcttcgataataatagccaatcgattattggatctagctgtctgtatcatattcaacatgtttaatatatcctttcgtttcccctttacaggcatcgatcgtagcatattttccgcgtctgatatggaaatgttaaaactacaaaaatgcgtaatgttagcccgtcctaatattggtacgtgtctataagtttggcatagtagaataatagacgtgtttaaatgccttccaaagtttaagaattctattagagtattgcattttgatagtttatcgcctacatcatcaaaaataagtaaaaagtgtgctgattttttatgattttgtgcgacagcaatacatttttctatgttacttttagttcgtatcagattatattctagagattcctgactactaacgaaattaatatgatttggccaaatgtatccatcataatctgggttataaacgggtgtaaacaagaatatatgtttatattttttaactagtgtagaaaacagagatagtaaatagatagtttttccagatccagatcctcctgttaaaaccattctaaacggcatttttaataaattttctcttgaaaattgtttttcttggaaacaattcataattatatttacagttactaaattaatttgataataaatcaaaatatggaaaactaaggttgttagtagggaggagaacaaagaaggcacatcgtgatataaataacatttattatcatgatgacaccagaaaacgacgaagagcagacatctgtgttctccgctactgtttacggagacaaaattcagggaaagaataaacgcaaacgcgtgattggtctatgtattagaatatctatggttatttcactactatctatgattaccatgtccgcgtttctcatagtgcgcctaaatcaatgcatgtctgctaacgaggctgctattactgacgccgctgttgccgttgctgctgcatcatctactcatagaaaggttgcgtctagcactacacaatatgatcacaaagaaagctgtaatggtttatattaccagggttcttgttatatattacattcagactaccagttattctcggatgctaaagcaaattgcactgcggaatcatcaacactacccaataaatccgatgtcttgactacctggctcattgattatgttgaggatacatggggatctgatggtaatccaattacaaaaactacatccgattatcaagattctgatgtatcacaagaagttagaaagtatttttgtgttaaaacaatgaactaatatttatttttgtacattaataaatgaaatcgcttaatagacaaactgtaagtaggtttaagaagttgtcggtgccggccgctataatgatgatactctcaaccattattagtggcataggaacatttctgcattacaaagaagaactgatgcctagtgcttgcgccaatggatggatacaatacgataaacattgttatttagatactaacattaaaatgtctacagataatgcggtttatcagtgtcgtaaattacgagctagattgcctagacctgatactagacatctgagagtattgtttagtattttttataaagattattgggtaagtttaaaaaagaccaatgataaatggttagatattaataatgataaagatatagatattagtaaattaacaaattttaaacaactaaacagtacgacggatgctgaagcgtgttatatatacaagtctggaaaactggttaaaacagtatgtaaaagtactcaatctgtactatgtgttaaaaaattctacaagtgacaacaaaaaatgaattaataataagtcgttaacgtacgccgccatggacgccgcgtttgttattactccaatgggtgtgttgactataacagatacattgtatgatgatctcgatatctcaatcatggactttataggaccatacattataggtaacataaaaactgtccaaatagatgtacgggatataaaatattccgacatgcaaaaatgctactttagctataagggtaaaatagttcctcaggattctaatgatttggctagattcaacatttatagcatttgtgccgcatacagatcaaaaaataccatcatcatagcatgcgactatgatatcatgttagatatagaagataaacatcagccattttatctattcccatctattgatgtttttaacgctacaatcatagaagcgtataacctgtatacagctggagattatcatctaatcatcaatccttcagataatctgaaaatgaaattgtcgtttaattcttcattctgcatatcagacggcaatggatggatcataattgatgggaaatgcaatagtaattttttatcataaaagttgtaaagtaaataataaaacaataaatattgaactagtagtacgtatattgagcaatcagaaatgatgctggtacctcttatcacggtgaccgtagttgcgggaacaatattagtatgttatatattatatatttgtaggaaaaagatacgtactgtctataatgacaataaaattatcatgacaaaattaaaaaagataaagagttctaattccagcaaatctagtaaatcaactgatagcgaatcagactgggaggatcactgtagtgctatggaacaaaacaatgacgtagataatatttctaggaatgagatattggacgatgatagcttcgctggtagtttaatatgggataacgaatccaatgttatggcgcctagcacagaacacatttacgatagtgttgctggaagcacgctgctaataaataatgatcgtaatgaacagactatttatcagaacactacagtagtaattaatgaaacggagactgttgaagtacttaatgaagataccaaacagaatcctaactattcatccaatcctttcgtaaattataataaaaccagtatttgtagcaagtcaaatccgtttattacagaacttaacaataaatttagtgagaataatccgtttagacgagcacatagcgatgattatcttaataagcaagaacaagatcatgaacacgatgatatagaatcatcggtcgtatcattggtgtgattagtttcctttttataaaattgaagtaatatttagtattattgctgccgtcacgttgtacaaatggagatattccctgtattcggcatttctaaaattagcaattttattgctaataatgactgtagatattatatagatacagaacatcaaaaaattatatctgatgagatcaatagacagatggatgaaacggtacttcttaccaacatcttaagcgtagaagttgtaaatgacaatgagatgtaccatcttattcctcatagattatcgacgattatactctgtattagttctgtcggaggatgtgttatctctatagataatgacatcaatggcaaaaatattctaacctttcccattgatcatgctgtaatcatatccccactgagtaaatgtgtcgtagttagcaagggtcctacaaccatattggttgttaaagcggatatacctagcaaacgattggtaacatcgtttacaaacgacatactatatgtaaacaatctgtcactgattaattatttgccgttgtctgtattcattattagacgagtcaccgactatttggatagacacatatgcgatcagatatttgctaataataagtggtattcccttataaccatcgacgataagcaatatcctattccatcaaactgtataggtatgtcctctgccaagtacataaattctagcatcgagcaagatactttaatccatgtttgtaacctcgagcatccgttcgactcagtatacaaaaaaatgcagtcgtacaattctctacctatcaaggaacaaatattgtacggtagaattgataatataaatatgagcattagtatttctgtggattaatagatttctagtatggggatcattaatcatctctaatctctaaatacctcataaaacgaaaaaaaagctattatcaaatactgtacggaatggattcattctcttctctttttatgaaactctgttgtatatctactgataaaactggaagcaaaaaatctgatagaaagaataagaataagatcaaggattatatggaacacgattattataaaataacaatagttcctggttcctcttccacgtctactagctcgtggtattatacacatgcctagtaatagtctctttgcgttgacggaaagcagactagaaataacaggctaaaatgttcagacaccataatagttcccaacccagataataacagagttccatcaacacattcctttaaactcaatcccaaacccaaaaccgttaaaatgtatccggccaattgatagtagataatgaggtgtacagcgcatgataatttacacagtaaccaaaatgaaaatactttagtaattataagaaatatagacggtaatgtcatcatcaacaatccgataatatgcctgagagtaaacattgacggataaaacaaaaatgctccgcataactctatcatggcaataacacaaccaaatacttgtaagattcctaaattagtagaaaatacaacgaatatcgatgtataagtgatctcgagaaataataagaataaagtaatgcccgtaaagataaacatcaacattgtttggtaatcattaaaccaattagtatgaagttgaactaatttcacagtagattttattccagtgttatcctcgcatgtataagtacctggtaagatatctttatattccataatcaatgagacatcactatctgataacgaatgaagtctagcactagtatgccatttacttaatattgtcgtcttggaagttttattataagttaaaatatcatggttatccaatttccatctaatatactttgtcggattatctatagtacacggaataatgatggtatcattacatgctgtatactctatggtctttgtagttgttataacaaccaacgtatagaggtatatcaacgatattctaactcttgacattttttatttatttaaaatgatacctttgttatttattttattctattttgctaacggtattgaatggcataagtttgaaacgagtgaagaaataatttctacttacttattagacgacgtattatacacgggtgttaatggggcggtatacacattttcaaataataaactaaacaaaactggtttaactaataataattatataacaacatctataaaagtagaggatgcggataaggatacattagtatgcggaaccaataacggaaatcccaaatgttggaaaatagacggttcagacgacccaaaacatagaggtagaggatacgctccttatcaaaatagcaaagtaacgataatcagtcacaacggatgtgtactatctgacataaacatatcaaaagaaggaattaaacgatggagaagatttgacggaccatgtggttatgatttattcacggcggataacgtaattccaaaagatggtttacgaggagcattcgtcgataaagacggtacttatgacaaagtttacattcttttcactgatactatcggctcaaagagaattgtcaaaattccgtatatagcacaaatgtgcctaaacgacgaaggtggtccatcatcattgtctagtcatagatggtcgacgtttctcaaagtcgaattagaatgtgatatcgacggaagaagttatagacaaattattcattctagaactataaaaacagataatgatacgatactatatgtattcttcgatagtccttattccaagtccgcattatgtacctattctatgaataccattaaacaatctttttctacgtcaaaattggaaggatatacaaagcaattgccgtctccagctcctggtatatgtttaccagctggaaaagttgttccacataccacgtttgaagtcatagaacaatataatgtactagatgatattataaagcctttatctaaccaacctatcttcgaaggaccgtctggtgttaaatggttcgatataaaggagaaggaaaatgaacatcgggaatatagaatatacttcataaaagaaaattctatatattcgttcgatacaaaatctaaacaaactcgtagctcgcaagtcgatgcgcgactattttcagtaatggtaactgcgaaaccgttatttatagcagatatagggataggagtaggaatgccacaaatgaaaaaaatacttaaaatgtaatcttaatcgagtacaccacacgacaatgaacaaacataagacagattatgctggttatgcttgctgcgtaatatgcggtctaattgtcggaattatttttacagcgacactattaaaagttgtagaacgtaaattagttcatacaccattaatagataaaacgataaaagatgcatatattagagaagattgtcctactgactggataagctataataataaatgtatccatttatctactgatcgaaaaacctgggaggaaggacgtaatgcatgcaaagctctaaattcaaattcggatctaattaagatagagactccaaacgagttaagttttttaagaagccttagacgaggctattgggtaggagaatccgaaatattaaaccagacaaccccatataattttatagctaagaatgccacgaagaatggaactaaaaaacggaaatatatttgtagcacaacgaatactcccaaactgcattcgtgttacactatataacaattacactacatttttatcataccactacttcggttagatgttttagaaaaaaataaatatcgccgtaccgttcttgtttttataaaaataacaattaacaattatcaaattttttctttaatattttacgtggttgaccattcttggtggtaaaataatctcttagtgttggaatggaatgctgtttaatgtttccacactcatcgtatattttgacgtatgtagtcacatcgtttacgcaatagtcagactgtagttctatcatgcttcctacatcagaaggaggaacagttttaaagtctcttggttttaatctattaccgttagttttcatgaaatcctttgttttatccacttcacattttaaataaatgtccactatacattcttttgttaattttactagatcgtcatgggtcatagaatttataggttccgtagtccatggatccaaactagcaaacttcgcgtatacggtatcgcgattagtgtatacaccaactgtatgaaaattaagaaaacagtttaataaatcaacagaaatatttaatcctccgtttgatacagatgcgccatatttatggatttcggattcacacgttgtttgtctgaggtgttcgtctagtgttgcttctacgtaaacttcgattcccatatattctttattgtcagaatcgcataccgatttatcatcatacactgtttgaaaactaaatggtatacacatcaaaataataaataataacgagtacattctgcaatattgttatcgtaattggaaaaatagtgttcgagtgagttggattatgtgagtattggattgtatattttattttatattttgtaataagaataaaatgctaatgtcaagtttattccaatagatgtcttattaaaaacatatataataaataacaatggctgaatggcataaaattatcgaggatatctcaaaaaataataagttcgaggatgccgccatcgttgattacaagactacaaagaatgttctagctgctattcctaacagaacatttgccaagattaatccgggtgaaattattcctctcatcactaatcgtaatattctaaaacctcttattggtcagaaatattgtattgtatatactaactctctaatggatgagaacacgtatgctatggagttgcttactgggtacgcccctgtatctccgatcgttatagcgagaactcataccgcacttatatttttgatgggtaagccaacaacatccagacgtgacgtgtatagaacgtgtagagatcacgctacccgtgtacgtgcaactggtaattaaaataaaaagtaatattcatatgtagtgtcaattttaaatgatgatgatgaaatggataatatccatattgacgatgtcaataatgccggtattggcatacagttcatcgatttttagatttcattcagaggatgtggaattatgttatgggcatttgtattttgataggatctataatgtagtaaatataaaatataatccgcatattccatatagatataattttattaatcgcacgttaaccgtagatgaactagacgataatgtcttttttacacatggttattttttaaaacacaaatatggttcacttaatcctagtttgattgtctcattatcaggaaacttaaaatataatgatatacaatgctcagtaaatgtatcgtgtctcattaaaaatttggcaacgagtacatctactatattaacatctaaacataagacttattctctacatcggtccacgtgtattactataataggatacgattctattatatggtataaagatataaatgacaagtataatgacatctatgattttactgcaatatgtatgctaatagcgtctacattgatagtgaccatatacgtgtttaaaaaaataaaaatgaactcttaattatgctatgctattagaaatggataaaatcaaaattacggttgattcaaaaattggtaatgttgttaccatatcgtataacttggaaaagataactattgatgtcacacctaaaaagaaaaaagaaaaggatgtattattagcgcaatcagttgctgtcgaagaggcaaaagatgtcaaggtagaagaaaaaaatattatcgatattgaagatgacgatgatatggatgtagaaagcgcgtaatacgatctataaaaataagtatataaatactttttatttactgtactcttactgtgtagtggtgataccctactcgattatttttttaaaaaaaaaatacttattctgattcttctagccatttccgtgttcgtttgaatgccacatcgacgtcaaagataggggagtagttgaaatctagttctgcattgttggtacgcacctcaaatgtagtgttggatatcttcaacgtatagttgttgagtagtgatggttttctaaatagaattctcttcatatcattcttgcacgcgtacatttttagcatccatcttggaatcctagatccttgttctattcccaatggtttcatcaatagaagattaaacatatcgtacgaacacgatggagagtaatcgtagcaaaagtaagcatttcctttaatcttagatcccggatactggatatattttgcagccaacacgtgcatccatgcagcatttcctacatatacccggctatgcaccgcgtcatcatcgactgtacgatacataatgttaccgtgttgcttacattgctcgtaaaagactttcatcaatttgtctccttctccgtaaattccagtgggtcttaggcaacaagtatacaattttgctccattcatgattacggaattattggctttcataaccagttgctcggccatacgtttactttttgcgtatacatgtcctggtgatatatcataaagggtatgctcatggccgatgaatggatcaccgtgtttattgggtcctattgcttccatgctactagtatagatcaaatacttgattcctaggtccacacaagctgccaaaatagtctgtgttccataatagtttactttcatgatttcattatcggtgtattttccaaatacatccactagagcagccgtatgaataatcagatttaccccatctagcgcttctctcaccttatcaaagtcgtttatatcacattgtatatagtttataaccttaactttcgaggttattggttgtggatcttctacaatatctatgactctgatttcttgaacatcatctgcactaattaacagttttactatatacctgcctagaaatccggcaccaccagtaaccgcgtacacggccattgctgccactcataatatcagactacttattctattttactaaataatggctgtttgtataatagaccacgataatatcagaggagttatttactttgaaccagtccatggaaaagataaagttttaggatcagttattggattaaaatccggaacgtatagtttgataattcatcgttacggagatattagtcaaggatgtgattccataggcagtccagaaatatttatcggtaacatctttgtaaacagatatggtgtagcatatgtttatttagatacagatgtaaatatatttacaattattggaaaggcgttatctatttcaaaaaatgatcagagattagcgtgtggagttattggtatttcttacataaatgaaaagataatacattttcttacaattaacgagaatggcgtttgatatatcagttaatgcgtctaaaacaataaatgcattagtttacttttctactcagcaaaataaattagtcatacgtaatgaagttaatgatacacactacactgtcgaatttgatagggacaaagtagttgacacgtttatttcatataatagacataatgacaccatagagataagaggggtgcttccagaggaaactaatattggttgcgcggttagtatgacttacttgtataataagtatagttttaaactgattttagcagaatatataagacacagaaatactatatccggcaatatttattcggcattgatgacactagatgatttggctattaaacagtatggagacattgatctattatttaatgagaaacttaaagtagactccgattcgggactatttgactttgtcaactttgtaaaggatatgatatgttgtgattctagaatagtagtagctctatctagtctagtatctaaacattgggaattgacaaataaaaaatataggtgtatggcattagccgaacatatatctgatagtattccaatatctgagctatctagactacgatacaatctatgtaagtatctacgcggacacactgagagcatagaggataaatttgattattttgaagacgatgattcgtctacatgttctgccgtaaccgacagggaaacggatgtataattttttttatagcgtgaaggatatgataaaaaatataattgttgtatttatcccattccaatcaccttatatgattctgtaacacaataaaggagtcttatagatgtatagaggtcagatactggtttgataaactgtttattccacataagtatgtttgactttatggttagacccgcatactttaacaaatcactgaaaattggagttaggtattgacctctcagaatcagttgccgttctggaacattaaatgtattttttatgatatactccaacgcatttatgtgggcatacaacaagtcattactaatggaatattccaagagttttagttgtctagtatttaacaagagaagagatttcaacagactgtttatgaactcgaatgccgcctcattgtcgcttatattgatgatgtcgaattctcccaatatcatcaccgatgagtagctcatcttgttatcgggatccaagttttctaaagatgtcattaaaccctcgatcatgaatggatttatcatcatcgtttttatgttggacatgagcttagtccgtttgtccacatctatagaagatgatttctgaattatttcatatatctctctctttaactccaggaacttgtcaggatggtctactttaatatgttctcgtctaagagatgaaaatctttggatggttgcacgcgacttttctctaaaggatgacgttgcccaagatcctctcttaaatgaatccatcttatccttggacaagatggacagtctattttccttagatggtttaatatttttgttacccatgatctataaaggtagacctaatcgtctcggatgaccatatatttattttcagttttattatacgcataaattgtaaaaaatatgttaggtttacgaaaatgtctcgtggggcattaatcgtttttgaaggattggacaaatctggaaaaacaacacaatgtatgaacatcatggaatcaataccttcaaacacaataaaataccttaactttcctcagagatccactgtcactggaaagatgatagatgactatctaactcgtaaaaaaacctataatgatcatatagttaatctattattttgtgcaaatagatgggagtttgcatcttttatacaagaacaactagaacagggaattactttaatagttgatagatacgcattttctggagtagcgtatgccgccgctaaaggcgcgtcaatgactctcagtaagagttatgaatctggattgcctaaacccgacttagttatattcttggaatctggtagcaaagaaattaatagaaacgtcggtgaggaaatttatgaagatgttacattccaacaaaaggtattacaagaatataaaaaaatgattgaagaaggagatattcattggcaaattatttcttctgaattcgaggaagatgtaaagaaggagttgattaagaatatagttatagaggctatacacacggttactggaccagtggggcaactgtggatgtaatagtgaaattacattttttataaatagatgttagtacagtgttataaatggatgaagcatattactctggcaacttggaatcagtactcggatacgtgtccgatatgcataccgaactcgcatcaatatctcaattagttattgccaagatagaaactatagataatgatatattaaacaaggacattgtaaattttatcatgtgtagatcaaacttggataatccatttatctctttcctagatactgtatatactattatagatcaagagaactatcagactgagttgattaattcattagacgacaatgaaattatcgattgtatagttaataagtttatgagcttttataaggataacctagaaaatatagtagatgctatcattactctaaaatatataatgaataatccagattttaaaactacgtatgccgaagtactcggttccagaatagccgatatagatattaaacaagtgatacgtaagaatatactacaattgtctaataatatccgcgaacgatatttgtgaaaatattaaaaaaaaatactttttttattaaatgacgtcttttcgtgaatttagaaaattatgctgtgctatatatcacgcatcaggatataaagaaaaatctaaattaattagagactttataacagatagggatgataaatatttgatcattaagctattgcttcccggattagacgatagaatttataacatgaacgataaacaaattataaaattatatagtataatatttaaacaatctcaggaagatatgctacaagatttaggatacggatatataggagacactattaggactttcttcaaagagaacacagaaatccgtccacgagataaaagcattttaactttagaagaagtggatagttttttaactacgttatcatccgtaactaaagaatcgcatcaaataaaattattgactgatgtagcatctgtttgtacatgtaatgatttaaaatgtgtagtcatgcttattgataaagatctaaaaattaaagcgggtcctcggtacgtacttaacgctattagtcctaatgcctatgatgtgtttagaaaatctaataacttgaaagagataatagaaaattcatctaaacaaaatctagactctatatctatttctgttatgactccaattaatcccatgttagcggaatcgtgtgattctgtcaataaggcgtttaaaaaatttccatcaggaatgtttgcggaagtcaaatacgatggtgaaagagtacaagttcataaaaataataacgagtttgccttctttagtagaaacatgaaaccagtactctctcataaagtggattatctcaaagaatacataccgaaagcatttaaaaaagctacgtctatcgtattggattctgaaattgttcttgtagacgaacataatgtaccgctcccgtttggaagtttaggtatacacaaaaagaaagaatataaaaactctaacatgtgtttgttcgtgtttgactgtttgtactttgatggattcgatatgacggacattccattgtacgaacgaagatcttttctcaaagatgttatggttgaaatacccaatagaatagtattctcagagttgacgaatattagtaacgagtctcagttaactgacgtattggatgatgcactaacgagaaaattagaaggattggtcttaaaagatattaatggagtatacgaaccgggaaagagaagatggttaaaaataaagcgagactatttgaacgagggttccatggcagattctgccgatttagtagtactaggtgcctactatggtaaaggagcaaagggtggtatcatggcagtctttctaatgggttgttacgacgatgaatccggtaaatggaagacggttaccaagtgttcaggacacgatgataatacgttaagggagttgcaagaccaattaaagatgattaaaattaacaaggatcccaaaaaaattccagagtggttagtagttaataaaatctatattcccgattttgtagtagaggatccgaaacaatctcagatatgggaaatttcaggagcagagtttacatcttccaagtcccataccgcaaatggaatatccattagatttcctagatttactaggataagagaggataaaacgtggaaagaatctactcatctaaacgatttagtaaacttgactaaatcttaatagttacatacaaactgaaaattaaaataacactatttagttggtggtcgccatggatggtgttattgtatactgtctaaacgcgctagtaaaacatggcgaggaaataaatcatataaaaaatgatttcatgattaaaccatgttgtgaaagagtttgtgaaaaagtcaagaacgttcacattggcggacaatctaaaaacaatacagtgattgcagatttgccatatatggataatgcggtatccgatgtatgcaattcactgtataaaaagaatgtatcaagaatatccagatttgctaatttgataaagatagatgacgatgacaagactcctactggtgtatataattattttaaacctaaagatgccattcctgttatcatatctataggaaaggataaagatgtctgtgaactattaatctcatcagacatatcgtgtgcatgcgtggagttaaattcatatcacgtagccattcttcccatggatgtttccttttttaccaaaggaaatgcatcattgattattctcctgtttgatttctctatcgatgcggcacctctcttaagaagtgtaaccgataataatgttattatatctagacaccagcgtctacatgacgagcttccgagttccaattggttcaagttttacataagtataaagtccgactattgttctatattatatatggttgttgatggatctgtgatgcatgcgatagctgataatagaactcacgcaattattagcaaaaatatattagacaatactacgattaacgatgagtgtagatgctgttattttgaaccacagattaggattcttgatagagatgagatgctcaatggatcatcgtgtgatatgaacagacattgtattatgatgaatttacctgatgtaggcgaatttggatctagtatgttggggaaatatgaacctgacatgattaagattgctctttcggtggctggtaatttaataagaaatcgagactacattcccgggagacgaggatatagctactacgtttacggtatagcctctagataatttttttaagcacgaaataaaaaacataattttaaaccaatctatttcatactattttgtgtgatcaccatggacataaagatagatattagtatttctggtgataaatttacggtgactactaggagggaaaatgaagaaagaaaaaaatatctacctctccaaaaagaaaaaactactgatgttatcaaacctgattatcttgagtacgatgacttgttagatagagatgagatgtttactattctagaggaatattttatgtacagaggtctattaggcctcagaataaaatatggacgactctttaacgaaattaaaaaattcgacaatgatgcggaagaacaattcggtactatagaagaactcaagcagaaacttagattaaattctgaagagggagcagataactttatagattatataaaggtacaaaaacaggatatcgtcaaacttactgtatacgattgcatatctatgataggattgtgtgcatgcgtggtagatgtttggagaaatgagaaactgttttctagatggaaatattgtttacgagcgattaaactgtttattgatgatcacatgcttgataagataaaatctatactgcagaatagactagtatatgtggaaatgtcatagaaagttaaaagttaatgagagcaaaaatatataaggttgtattccatatttgttatttttttctgtaatagttagaaaaatacattcgatggtctatctatcagattattatgtgttataaggtactttttctcataataaactagagtatgagtaagatagtgtttttcaaaacatataaatctaaaattgatggatgagatatacagctattaatttcgaaaatatattttaatctgataactttaaacatggatttttaatggtggtttaacgttttaaaaaaagattttgttattgtagtatatgataatattaaaagatggatataaagaatttgctgactgcatgtactattttttacattactacattggctacggcagatatacctacttcgtcactgccacacgctccggtaaacggggcatgtgacgagggagaatatcttgataagaggcataatcaatgttgtaatcagtgtccacctggagaatttgccaaggttagatgtaatggtaacgataacacaaaatgtgaacgctgcccacctcatacatataccgcaatccccaattactctaatggatgtcatcaatgtagaaaatgcccaacaggatcatttgataaggtaaagtgtaccggaacacagaacagtaaatgttcgtgtcttcctggttggtattgcgctactgattcttcacagactgaagattgtcgagattgtataccaaaaaggagatgtccatgcggatactttggtggaatagatgaacaaggaaatcctatttgtaaatcgtgttgtgttggtgaatattgcgactacctacgtaattatagacttgatccatttcctccatgcaaactatctaaatgtaattaattatgattttgatgataatgttaccatacattatatcgctacttggttagtgtattattcagtatgaagacctattaataattacttatcttttgacgatcttgttataattataatataaaaatacttatggcatagtaactcataattgctgacgcgataaattcgtaataatctgttttgttcaaatttttataaggaatctacaggcataaaaataaaaatataatttataatatactcttacagcgcgccatcatgaataacagcagtgaattgattgctgttattaatggatttagaaatagtggacgattttgtgatattaatatagttattaatgatgaaaggataaacgctcacagactcatcctatctggagcctccgaatatttttccattctgttttccaataattttatcgattctaatgaatacgaagttaatctaagtcatttagattatcaaagtgttaacgatttgatcgattacatttatgggatacctttgagcctaactaacgataacgtgaaatatattctttcaaccgctgattttttacaaattggatctgctattacggagtgtgaaaattacatacttaaaaatctttgttctagaaactgtatcgatttctacatatacgctgataaatataataacaagaaaatagaatcagcgtcgtttaacacaatattacaaaatattttgagactcatcaacgatgaaaactttaaatacttaacagaggaatcaatgataaaaattttaagcgatgatatgttaaatataaaaaatgaggatttcgccccactaattctcattaaatggttagagagtactcaacaaccatgcaccgtcgagttacttaaatgcctcagaatatcattgctttccccacaagttataaaatcactttatagtcatcgactggttagttcaatctacgaatgtataacattcttaaacaatatagcattcttggatgaatcatttcctagataccatagcatcgagttgatatctatcggtataagtaattcgcatgataagatttccataaactgctacaatcataaaaaaaatacatgggaaatgatatcttcacgtagatataggtgtagtttcgcagtggccgtcctggataatattatctatatgatgggtggatatgatcagtccccgtatagaagttcaaaggttatagcgtacaatacatgtacaaattcttggatatatgatataccagagctaaaatatcctcgttctaattgtgggggactggctgatgacgaatacatttattgtataggcggcatacgcgatcaggattcatcgttgacatctagtattgatagatggaagccatcaaaaccatattggcagaagtatgctaaaatgcgcgaaccaaaatgtgatatgggggttgcgatgttaaacggattaatatatgttataggtggaatcgttaaaggtgacacgtgtaccgacgcactagagagtttatcagaagatggatggatgaagcatcaacgtcttccaataaaaatgtccaatatgtcgacgattgttcatgatggcaagatttatatatctggaggttacaacaatagtagtgtagttaatgtaatatcgaatctagtccttagctataattcgatatatgatgaatggaccaaattatcatcattaaacattcctagaattaatcccgctctatggtcagcgcataataaattatatgtaggaggaggaatatctgatgatgttcgaactaatacatctgagacatacgacaaagaaaaagattgttggacattggataatggtcacgtgttaccacgcaattatataatgtataaatgcgaaccgattaaacataaatatccattggaaaaaacacagtacacgaatgattttctaaagtatttggaaagttttataggtagttgatagaacaaaatacataattttgtaaaaataaatcactttttatactaatatgacacgattaccaatacttttgttactaatatcattagtatacgctacaccttttcctcagacatctaaaaaaataggtgatgatgcaactctatcatgtaatcgaaataatacaaatgactacgttgttatgagtgcttggtataaggagcccaattccattattcttttagctgctaaaagcgacgtcttgtattttgataattataccaaggataaaatatcttacgactctccatacgatgatctagttacaactatcacaattaaatcattgactgctagagatgccggtacttatgtatgtgcattctttatgacatcaactacaaatgacactgataaagtagattatgaagaatactccacagagttgattgtaaatacagatagtgaatcgactatagacataatactatctggatctacacattcaccggaaactagttctaagaaacctgattatatagataattctaattgctcgtcggtattcgaaatcggtacccggggatcagcttgcatgcctgcagcaattcccgaggctgtagccgacgatggtgcgccaggagagttgttgattcattgtttgcctccctgctgcggtttttcaccgaagttcatgccagtccagcgtttttgcagcagaaaagccgccgacttcggtttgcggtcgcgagtgaagatccctttcttgttaccgccaacgcgcaatatgccttgcgaggtcgcaaaatcggcgaaattccatacctgttcaccgacgacggcgctgacgcgatcaaagacgcggtgatacatatccagccatgcacactgatactcttcactccacatgtcggtgtacattgagtgcagcccggctaacgtatccacgccgtattcggtgatgataatcggctgatgcagtttctcctgccaggccagaagttctttttccagtaccttctctgccgtttccaaatcgccgctttggacataccatccgtaataacggttcaggcacagcacatcaaagagatcgctgatggtatcggtgtgagcgtcgcagaacattacattgacgcaggtgatcggacgcgtcgggtcgagtttacgcgttgcttccgccagtggcgcgaaatattcccgtgcaccttgcggacgggtatccggttcgttggcaatactccacatcaccacgcttgggtggtttttgtcacgcgctatcagctctttaatcgcctgtaagtgcgcttgctgagtttccccgttgactgcctcttcgctgtacagttctttcggcttgttgcccgcttcgaaaccaatgcctaaagagaggttaaagccgacagcagcagtttcatcaatcaccacgatgccatgttcatctgcccagtcgagcatctcttcagcgtaagggtaatgcgaggtacggtaggagttggccccaatccagtccattaatgcgtggtcgtgcaccatcagcacgttatcgaatcctttgccacgcaagtccgcatcttcatgacgaccaaagccagtaaagtagaacggtttgtggttaatcaggaactgttcgcccttcactgccactgaccggatgccgacgcgaagcgggtagatatcacactctgtctggcttttggctgtgacgcacagttcatagagataaccttcacccggttgccagaggtgcggattcaccacttgcaaagtcccgctagtgccttgtccagttgcaaccacctgttgatccgcatcacgcagttcaacgctgacatcaccattggccaccacctgccagtcaacagacgcgtggttacagtcttgcgcgacatgcgtcaccacggtgatatcgtccacccaggtgttcggcgtggtgtagagcattacgctgcgatggattccggcatagttaaagaaatcatggaagtaagactgctttttcttgccgttttcgtcggtaatcaccattcccggcgggatagtctgccagttcagttcgttgttcacacaaacggtgatacgtacacttttcccggcaataacatacggcgtgacatcggcttcaaatggcgtatagccgccctgatgctccatcacttcctgattattgacccacactttgccgtaatgagtgaccgcatcgaaacgcagcacgatacgctggcctgcccaacctttcggtataaagacttcgcgctgataccagacgttgcccgcataattacgaatatctgcatcggcgaactgatcgttaaaactgcctggcacagcaattgcccggctttcttgtaacgcgctttcccaccaacgctgatcaattccacagttttcgcgatccagactgaatgcccacaggccgtcgagttttttgatttcacgggttggggtttctacaggacgtaacattctagtcgaggaattcatttatagcatagaaaaaaacaaaatgaaattctactatatttttacatacatatattctaaatatgaaagtggtgattgtgactagcgtagcatcgcttctagacatctatatactatatagtaataccaatactcaagactacgaaactgatacaatctcttatcatgtgggtaatgttctcgatgtcgatagccatatgcccggtagttgcgatatacataaactgatcactaattccaaacccacccgctttttatagtaagtttttcacccataaataataaatacaataattaatttctcgtaaaagtagaaaatatattctaatttattgcacggtaaggaagtagaatcataaagaacagtgacggatccccgatccccgacctgcaggcatgcaagctcgactccggaaccaattactgataatgtagaagatcatacagacaccgtcacatacactagtgatagcattaatacagtaagtgcatcatctggagaatccacaacagacgagactccggaaccaattactgataaagaagatcatacagttacagacactgtctcatacactacagtaagtacatcatctggaattgtcactactaaatcaaccaccgatgatgcggatctttatgatacgtacaatgataatgatacagtaccaccaactactgtaggcggtagtacaacctctattagcaattataaaaccaaggactttgtagaaatatttggtattaccgcattaattatattgtcggccgtggcaattttctgtattacatattatatatataataaacgttcacgtaaatacaaaacagagaacaaagtctagatttttgacttacataaatgtctgggatagtaaaatctatcatattgagcggaccatctggtttaggaaagacagccatagccaaaagactatgggaatatatttggatttgtggtgtcccataccactagatttcctcgtcctatggaacgagaaggtgttgattaccattacgttaacagagaggccatctggaagggaatagccgccggaaactttctagaacatactgagtttttaggaaatatttacggaacttctaaaacagctgtgaatacagcggctattaataatcgtatttgtgtgatggatctaaacatcgacggtgttagaagtcttaaaaatacgtacctaatgccttactcggtgtatataagacctacctctcttaaaatggttgagaccaagcttcgtcgtagaaacactgaagctaacgatgagattcatcgtcgtgtgatgttggcaaaaactgacatggatgaggcaggtgaagccggtctattcgacactattatcattgaagatgatgtgaatttagcatatagtaagttaattcagatactacaggaccgtattagaatgtattttaacactaattagagacttaagacttaaaacttgataattaataatataactcgtttttatatgtgtctatttcaacgtctaatgtattagttaaatattaaaacttaccacgtaaaacttaaaatttaaaatgatatttcattgacagatagatcacacattatgaactttcaaggacttgtgttaactgacaattgcaaaaatcaatgggtcgttggaccattaataggaaaaggtggattcggtagtatttatactactaatgacaataattatgtagtaaaaatagagcccaaagctaacggatcattatttaccgaacaggcattttatactagagtacttaaaccatccgttatcgaagaatggaaaaaatctcacaatataaagcacgtaggtcttatcacgtgcaaggcatttggtctatacaaatccattaatgtggaatatcgattcttggtaattaatagattaggtgcagatctagatgcggtgatcagagccaataataatagactaccaaaaaggtcggtgatgttgatcggaatcgaaatcttaaataccatacaatttatgcacgagcaaggatattctcacggagatattaaagcgagtaatatagtcttagatcaaatagataagaataaattatatctagtggattacggattggtttctaaattcatgtctaatggcgaacatgttccatttataagaaatccaaataaaatggataacggtactctagaatttacacctatagattcgcataaaggatacgttgtatctagacgtggagatctagaaacacttggatattgtatgattagatggttgggaggtatcttaccatggactaagatatctgaaacaaagaattgtgcattagtaagtgccacaaaacagaaatatgttaacaatactgcgactttgttaatgaccagtttgcaatatgcacctagagaattgctgcaatatattaccatggtaaactctttgacatattttgaggaacccaattacgacaagtttcggcacatattaatgcagggtgtatattattaagtgtggtgtttggtcgataaaaattaaaaaataacttaatttattattgatctcgtgtgtacaaccgaaatcatggcgatgttttacgcacacgctctcggtgggtacgacgagaatcttcatgcctttcctggaatatcatcgactgttgccaatgatgtcaggaaatattctgttgtgtcagtttataataacaagtatgacattgtaaaagacaaatatatgtggtgttacagtcaggtgaacaagagatatattggagcactgctgcctatgtttgagtgcaatgaatatctacaaattggaaatccgatccatgatcaagaaggaaatcaaatctctatcatcacatatcgccacaaaaactactatgctctaagcggaatcgggtacgagagtctagacttgtgtttggaaggagtagggattcatcatcacgtacttgaaacaggaaacgctgtatatggaaaagttcaacatgattattctactatcaaagagaaggccaaagaaatgagtgcacttagtccaggacctatcatcgattaccacgtctggataggagattgtatctgtcaagttactgctgtggacgtacatggaaaggaaattatgaaaatgagattcaaaaagggtgcggtgcttccgatcccaaatctggtaaaagttaaacttggggagaatgatacagaaaatctttcttctactatatcggcggcaccatcgaggtaaccacctctctggaagacagcgtgaatcatgtactcatgaaacgtttggaaactatacgccatatgtggtctgttgtatatgatcattttgatattgtgaatggtaaagaatgctgttatgtgcatacgcattcatctaatcaaaatcctataccgagtactgtaaaaacaaatttgtacatgaagactatgggatcatgcattcaaatggattccatggaagctctagagtatcttagcgaactgaaggaatcaggtggatggagtcccagaccagaaatgcaggaatttgaatatccagatggagtggaagacactgaatcaattgagagattggcagaggagttcttcaatagatcagaacttcaggctggtgaatcagtcaaatttggtaattctattaattgttaaacatacatctgtttcagctaagcaactaagaacacgtatacggcagcagcttccttctatactctcatcttttaccaacacaaagggtggatatttgttcattggagttgataataatacacacaaagtatttggattcacggtgggttacgactacctcagactgatagagaatgatatagaaaagcatatcaaaagacttcgtgttgtgcatttctgtgagaagaaagaggacatcaagtacgcgtgtcgattcatcaaggtatataaacctggggatgagactacctcgacatacgtgtgcgctatcaaagtggaaagatgctgttgtgctgtgtttgcagattggccagaatcatggtatatggatactaatggtatcaagaagtattctccagatgaatgggtgtcacatataaaattttaattaatgtaactatagagaacaaataataaggttgtaatatcatatagacaataactaacaattaattagtaactgttatctcttttttaactaaccaactaactatatacctattaatacatcgtaattatagttcttaacatctattaatcattaattcgcttctttaattttttataaactaacattgttaattgaaaagggataacatgttacagaatataaattatatatggatttttttaaaaaggaaatacttgactggagtatatatttatctcttcattatatagcacgcgtgttttccaatttttccacatcccatataatacaggattataatctcgttcgaacatacgagaaagtggataaaacaatagttgattttttatctaggttgccaaatttattccatattttagaatatggggaaaatattctacatatttattctatggatgatgctaatacgaatattataattttttttctagatagagtattaaatattaataagaacgggtcatttatacacaatctcgggttatcatcatccattaatataaaagaatatgtatatcaattagttaataatgatcatccagataataggataagactaatgcttgaaaatggacgtagaacaagacattttttgtcctatatatcagatacagttaatatctatatatgtattttaataaatcatggattttatatagatgccgaagacagttacggttgtacattattacatagatgtatatatcactataagaaatcagaatcagaatcatacaatgaattaattaagatattgttaaataatggatcagatgtagataaaaaagatacgtacggaaacacaccttttatcctattatgtaaacacgatatcaacaacgtggaattgtttgagatatgtttagagaatgctaatatagactctgtagactttaatagatatacacctcttcattatgtctcatgtcgtaataaatatgattttgtaaagttattaatttctaaaggagcaaatgttaatgcgcgtaataaattcggaactactccattttattgtggaattatacacggtatctcgcttataaaactatatttggaatcagacacagagttagaaatagataatgaacatatagttcgtcatttaataatttttgatgctgttgaatctttagattatctattatccagaggagttattgatattaactatcgtactatatacaacgaaacatctatttacgacgctgtcagttataatgcgtataatacgttggtctatctattaaacaaaaatggtgattttgagacgattactactagtggatgtacatgtatttcggaagcagtcgcaaacaacaacaaaataataatggaagtactattgtctaaacgaccatctttgaaaattatgatacagtctatgatagcaattactaaacataaacagcataatgcagatttattgaaaatgtgtataaaatatactgcgtgtatgaccgattatgatactcttatagatgtacagtcgctacagcaatataaatggtatattttaagatgtttcgatgaaatagatatcatgaagagatgttatataaaaaataaaactgtattccaattagttttttgtatcaaagacattaatactttaatgagatacggtaaacatccttctttcgtgaaatgcactagtctcgacgtatacggaagtcgtgtacgtaatatcatagcatctattagatatcgtcagagattaattagtctattatccaagaagctggatcctggagataaatggtcgtgttttcctaacgaaataaaatataaaatattggaaaactttaacgataacgaactatccacatatctaaaaatcttataaacattattaaaatataaaatctaagtaggataaaatcacactacatcattgtttccttttagtgctcgacagtgtatactatttttaacgctcataaataaaaatgaaaacgatttccgttgttacgttgttatgcgtactacctgctgttgtttattcaacatgtactgtacccactatgaataacgctaaattaacgtctaccgaaacatcgtttaatgataaccagaaagttacgtttacatgtgatcagggatatcattctttggatccaaatgctgtctgtgaaacagataaatggaaatacgaaaatccatgcaaaaaaatgtgcacagtttctgattatgtctctgaactatataataaaccgctatacgaagtgaattccaccatgacactaagttgcaacggcgaaacaaaatattttcgttgcgaagaaaaaaatggaaatacttcttggaatgatactgttacgtgtcctaatgcggaatgtcaacctcttcaattagaacacggatcgtgtcaaccagttaaagaaaaatactcatttggggaatatatgactatcaactgtgatgttggatatgaggttattggtgcttcgtacataagttgtacagctaattcttggaatgttattccatcatgtcaacaaaaatgtgatatgccgtctctatctaacggattaatttccggatctacattttctatcggtggcgttatacatcttagttgtaaaagtggttttacactaacggggtctccatcatccacatgtatcgacggtaaatggaatcccatactcccaatatgtgtacgaactaacgaaaaatttgatccagtggatgatggtcccgacgatgagacagatttgagcaaactctcgaaagacgttgtacaatatgaacaagaaatagaatcgttagaagcaacttatcatataatcatagtggcgttgacaattatgggcgtcatatttttaatctccgttatagtattagtttgttcctgtgacaaaaataatgaccaatataagttccataaattgctaccgtaaatataaatccgttaaaataattaataatttaataacaaacaagtatcaaaagattaaagacttatagctagaatcaattgagatgtcttcttcagtggatgttgatatctacgatgccgttagagcatttttactcaggcactattataacaagagatttattgtgtatggaagaagtaacgccatattacataatatatacaggctatttacaagatgcgccgttataccgttcgatgatatagtacgtactatgccaaatgaatcacgtgttaaacaatgggtgatggatacacttaatggtataatgatgaatgaacgcgatgtttctgtaagcgttggcaccggaatactattcatggaaatgtttttcgattacaataaaaatagtatcaacaatcaactaatgtatgatataattaatagcgtatctataattctagctaatgagagatatagaagcgcttttaacgacgatggtatatacatccgtagaaatatgattaacaagttgtacggatacgcatctctaactactattggcacgatcgctggaggtgtttgttattatctgttgatgcatctagttagtttgtataaataattatttcaatatactagttaaaattttaagattttaaatgtataaaaaactaataacgtttttatttgtaataggtgcattagcatcctattcgaataatgagtacactccgtttaataaactgagtgtaaaactctatatagatggagtagataatatagaaaattcatatactgatgataataatgaattggtgttaaattttaaagagtacacaatttctattattacagagtcatgcgacgtcggatttgattccatagatatagatgttataaacgactataaaattattgatatgtataccattgactcgtctactattcaacgcagaggtcacacgtgtagaatatctaccaaattatcatgccattatgataagtacccttatattcacaaatatgatggtgatgagcgacaatattctattactgcagagggaaaatgctataaaggaataaaatatgaaataagtatgatcaacgatgatactctattgagaaaacatactcttaaaattggatctacttatatatttgatcgtcatggacatagtaatacatattattcaaaatatgatttttaaaaatttaaaatatattatcacttcagtgacagtagtcaaataacaaacaacaccatgagatatattataattctcgcagttttgttcattaatagtatacatgctaaaataactagttataagtttgaatccgtcaattttgattccaaaattgaatggactggggatggtctatacaatatatcccttaaaaattatggcatcaagacgtggcaaacaatgtatacaaatgtaccagaaggaacatacgacatatccgcatttccaaagaatgatttcgtatctttctgggttaaatttgaacaaggcgattataaagtggaagagtattgtacgggactatgcgtcgaagtaaaaattggaccaccgactgtaacattgactgaatacgacgaccatatcaatttgtacatcgagcatccgtatgctactagaggtagcaaaaagattcctatttacaaacgcggtgacatgtgtgatatctacttgttgtatacggctaacttcacattcggagattctaaagaaccagtaccatatgatatcgatgactacgattgcacgtctacaggttgcagcatagactttgtcacaacagaaaaagtgtgcgtgacagcacagggagccacagaagggtttctcgaaaaaattactccatggagttcgaaagtatgtctgacacctaaaaagagtgtatatacatgcgcaattagatccaaagaagatgttcccaatttcaaggacaaaatggccagagttatcaagagaaaatttaatacacagtctcaatcttatttaactaaatttctcggtagcacatcaaatgatgttaccacttttcttagcatgcttaacttgactaaatattcataactaatttttattaatgatacaaaaacgaaataaaactgcatattatacactggttaacgcccttataggctctaaccattttcaagatgaggtccctgattatagtccttctgttcccctctatcatctactccatgtctattagacgatgtgagaagactgaagaggaaacatggggattgaaaatagggttgtgtataattgccaaagatttctatcccgaaagaactgattgcagtgttcatctcccaactgcaagtgaaggattgataactgaaggcaatggattcagggatatacgaaacaccgataaattataaaaaaagcaatgtgtccgctgtttccgttaataatactattttcgtaactggcggattattcataaataactctaatagcacgatcgtggttaacaatatggaaaaacttgacatttataaagacaaacaatggtcgattatagaaatgcctatggctagggtatatcacggcattgactcgacatttggaatgttatattttgccggaggtctatccgttaccgaacaatatggtaatttagagaaaaacaacgagatatcttgttacaatcctagaacgaataagtggtttgatatttcatatactatttataagatatccatatcatcattgtgtaaactaaataacgtcttctatgtatttagtaaggacattggatatgtggaaaagtatgatggtgcatggaagttagtacatgatcgtctccccgctataaaggcattatcaacttctccttattgattgaaaatgaaaatataaatagtttttatgtatagcagtattaccctatagttttattgcttactactaacatggatacagatgttacaaatgtagaagatatcataaatgaaatagatagagagaaagaagaaatactaaaaaatgtagaaattgaaaataataaaaacattaacaagaatcatcccaatgaatatattagagaagcactcgttattaataccagtagtaatagtgattccattgataaagaagttatagaatgtatcagtcacgatgtaggaatatagatcatatctactaatttttataatcgatacaaaacataaaaaacaactcgttattacatagcaggcatggaatccttcaagtattgttttgataacgatggcaagaaatggattatcggaaatactttatattctggtaattcaatactctataaggtcagaaaaaatttcactagttcgttctacaattacgtaatgaagatagatcacaaatcacacaagccattgttgtctgaaatacgattctatatatctgtattggatcctttgactatcgacaactggacacgggaacgtggtataaagtatttggctattccagatctgtatggaattggagaaaccgatgattatatgttcttcgttataaagaattcgggaagagtattcgccccaaaggatactgaatcagtcttcgaagcatgcgtcactatgataaacacgttagagtttatacactctcgaggatttacccatggaaaaatagaaccgaggaatatactgattagaaataaacgtctttcactaattgactattctagaactaacaaactatacaagagtggaaactcacatatagattacaacgaggacatgataacttcaggaaatatcaattatatgtgtgtagacaatcatcttggagcaacagtttcaagacgaggagatttagaaatgttgggatattgcatgatagaatggttcggtggcaaacttccatggaaaaacgaaagtagtataaaagtaataaaacaaaaaaaagaatataaaaaatttatagctactttctttgaggactgttttcctgaaggaaatgaacctctggaattagttagatatatagaattagtatacacgttagattattctcaaactcctaattatgacagactacgtaaactgtttatacaagattgaaattatattcttttttttatagagtgtggtagtgttacggatatctaatattaatattagactatctctatcgcgctacacgaccaatatcgattactatggatatcttctatgaaaggagagaatgtatttatttctccagcgtcaatctcgtcagtattgacaatactgtattatggagctaatggatccactgctgaacagctatcaaaatatgtagaaacggaggagaacacggataaggttagcgctcagaatatctcattcaaatccatgaataaagtatatgggcgatattctgccgtgtttaaagattcctttttgagaaaaattggcgataagtttcaaactgttgacttcactgattgtcgcactatagatgcaatcaacaagtgtgtagatatctttactgaggggaaaatcaatccactattggatgaaccattgtctcctagcaattagtgccgtatactttaaagcaaaatggttgacgccattcgaaaaggaatttaccagtgattatcccttttacgtatctccgacggaaatggtagacgtaagtatgatgtctatgtacggcaaggcatttaatcacgcatctgtaaaagaatcattcggcaacttttcaatcatagaactgccatatgttggagatactagtatgatggtcattcttccagacaagattgatggattagaatccatagaacaaaatctaacagatacaaattttaagaaatggtgtgactttatggatgctatgtttatagatgttcacattcccaagtttaaggtaacaggctcgtataatctggtggatactctagtaaagtcaggactgacagaggtgttcggttcaactggagattatagcaatatgtgtaatttagatgtgagtgtcgacgctatgatccacaaaacgtatatagatgtcaatgaagagtatacagaagcagctgcagcaacttctgtactagtggcagactgtgcatcaacaattacaaatgagttctgtgcagatcatccgttcatctatgtgattaggcatgttgatggaaaaattcttttcgttggtagatattgctctccgacaactaattgttaaccattttttttaaaaaaaatagaaaaaacatgtggtattagtgcaggtcgttgttcttccaattgcaattggtaagatgacggccaactttagtacccacgtcttttcaccacagcactgtggatgtgacagactgaccagtattgatgacgtcaaacaatgtttgactgaatatatttattggtcgtcctatgcataccgcaacaggcaatgcgctggacaattgtattccacactcctctcttttagagatgatgcggaattagtgttcatcgacattcgcgagctggtaaaaaatatgccgtgggatgatgtcaaagattgtacagaaatcatccgttgttatataccggatgagcaaaaaaccatcagagagatttcggccatcatcggactttgtgcatatgctgctacttactggggaggtgaagaccatcccactagtaacagtctgaacgcattgtttgtgatgcttgagatgctaaattacgtggattataacatcatattccggcgtatgaattgatgagttgtacatcttgacattttctttcttctcttctccctttcttctcttctcccttcctccctcttctccctttcccagaaacaaacttttttacccactataaaataaaatgagtatactacctattatatttcttcctatatttttttattcttcattcgttcagacttttaacgcgtctgaatgtatcgacaaagggcaatattttgcatcattcatggagttagaaaacgagccagtaatcttaccatgtcctcaaataaatacgctatcatccggatataatatattagatattttatgggaaaaacgaggagcggataatgatagaattataccgatagataatggtagcaatatgctaattctgaacccgacacaatcagactctggtatttatatatgcattaccacgaacgaaacctactgtgacatgatgtcgttaaatttgacaatcgtgtctgtctcagaatcaaatatagatcttatctcgtatccacaaatagtaaatgagagatctactggcgaaatggtatgtcccaatattaatgcatttattgctagtaacgtaaacgcagatattatatggagcggacatcgacgccttagaaataagagacttaaacaacggacacctggaattattaccatagaagatgttagaaaaaatgatgctggttattatacatgtgttttagaatatatatacggtggcaaaacatataacgtaaccagaattgtaaaattagaggtacgggatagaataataccttctactatgcaattaccagatggcattgtaacttcaataggtagtaatttgactattgcatgcagagtatcgttgagacctcccacaacggacaccgacgtcttttggataagtaatggtatgtattacgaagaagatgatggggacggaaacggtagaataagtgtagcaaataaaatctatatgaccgataagagacgtgttattacatcccggttaaacattaatcctgtcaaggaagaagatgctacaacgtttacgtgtatggcgtttactattcctagcatcagcaaaacagttactgttagtataacgtgaatgtatgttgttacatttccatgtcaattgagtttataagaatttttatacattatcttccaacaaacaattgacgaacgtattgctatgattaactcccacgatactatgcatattattaatcattaacttgcagactatacctagtgctattttgacatactcgtgttcttgtgtaattgcggtatctatattattaaagtacgtaaatctagctatagttttattatttaattttagataatataccgtctccttatttttaaaaattgccacatcctttattaaatcatgaatgggaatttctatgtcatcgttagtatattgtgaacaacaagagcagatatctataggaaagggtggaatgcgatacattgatctatgtagttttaaaacacacgcgaactttgaagaatttatataaatcattccatcgatacatccttctatgttgacatgtatatatccaggaattcttttattaatgtcaggaaatgtataaactaaaacattgcccgaaagcggtgcctctatctgcgttatatccgttcttaacttacaaaatgtaaccaatacctttgcatgacttgttttgttcggcaacgttagtttaaacttgacgaatggattaattacaatagcatgatccgcgcatctattaagtttttttactttaacgcccttgtatgtttttacagagactttatctaaatttctagtgcttgtatgtgttataaatataacgggatatagaaccgaatcacctaccttagatacccaattacattttatcagatccagataataaacaaattttgtcgccctaactaattctatattgttatatattttacaattggttatgatatcatgtaataacttggagtctaacgcgcatcgtcgtacgtttatacaattgtgatttagtgtagtatatctacacatgtatttttccgcactatagtattctggactagtgataaaactatcgttatatctgtcttcaatgaactcatcgagatattgctctctgtcatattcatacacctgcataaactttctagacatcttacaatccgtgttattttaggatcatatttacatatttacgggtatatcaaagatgttagattagttaatgggaatcgtctataataatgaatattaaacaattatatgaggacttttaccacaaagcatcataaaaatgagtcgtcgtctgatttatgttttaaatatcaaccgcaaatcaactcataaaatacaagagaatgaaatatatacatattttagtcattgcaatatagaccatacttctacagaacttgattttgtagttaaaaactatgatctaaacagacgacaacctgtaactgggtatactgcactacactgctatttgtataataattactttacaaacgatgtactgaagatattattaaatcatgacgtaaatgtaacgatgaaaaccagtagcggacgtatgcctgtttatatattgcttactagatgttgtaatatttcacatgatgtagtgatagatatgatagacaaagataaaaaccacttattacatagagactattccaacctattactagagtatataaaatctcgttacatgttattgaaggaagaggatatcgatgagaacatagtatccactttattagataagggaatcgatcctaactttaaacaagacggatatacagcgttacattattattatttgtgtctcgcacacgtttataaactaggtgagtgtagaaaaccgataacgataaaaaaggccaagcgaattatttctttgtttatacaacatggagctaatctaaacgcgttagataattgtggtaatacaccattccatttgtatcttagtattgaaatgtgtaataatattcatatgactaaaatgctgttgacttttaatccgaatttcaaaatatgtaataatcatggattaacgcctatactatgttatataacttccgactacatacaacacgatattcttgttatgttaatacatcactatgaaacaaatgttggagaaatgccgatagatgagcgtcgtatgatcgtattcgagtttatcaaaacatattctacacgtccggcagattcgataacttatttgatgaataggtttaaaaatataaatatttatacccgctatgaaggaaagacattattacacgtagcatgtgaatataataatacacaagtaatagattatcttatacgtatcaacggagatataaatgcgttaaccgacaataacaaacacgctacacaactcattatagataacaaagaaaattccccatataccattaattgtttactgtatatacttagatatattgtagataagaatgtgataagatcgttggtggatcaacttccatctctacctatcttcgatataaaatcatttgagaaattcatatcctactgtatacttttagatgacacattttacgataggcacgttaagaatcgcgattctaaaacgtatcgatacgcattttcaaaatacatgtcgtttgataaatacgatggtataataactaaatgtcacgacgaaacaatgttactcaaactgtccactgttctagacactacactatatgcagttttaagatgtcataattcgagaaagttaagaagatacctcaacgagttaaaaaaatataataacgataagtcctttaaaatatattctaatattatgaatgagagataccttaatgtatattataaagatatgtacgtgtcaaaggtatatgataaactatttcctgttttcacagataaaaattgtctactaacattactaccttcagaaattatatacgaaatattatacatgctgacaattaacgatctttataatatatcgtatccacctaccaaagtatagttgtatttttctcatgcgatgtgtgtaaaaaaactgatattatataaatattttagtgccgtataataaagatgacgatgaaaatgatggtacatatatatttcgtatcattattgttattgctattccacagttacgccatagacatcgaaaatgaaatcacagaattcttcaataaaatgagagatactctaccagctaaagactctaaatggttgaatccagcatgtatgttcggaggcacaatgaatgatatagccgctctaggagagccattcagcgcaaagtgtcctcctattgaagacagtcttttatcgcacagatataaagactatgtggttaaatgggagaggctagaaaagaatagacggcgacaggtttctaataaacgtgttaaacatggtgatttatggatagccaactatacatctaaattcagtaaccgtaggtatttgtgcaccgtaactacaaagaatggtgactgtgttcagggtatagttagatctcatattaaaaaacctccttcatgcattccaaaaacatatgaactaggtactcatgataagtatggcatagacttatactgtggaattctttacgcaaaacattataataatataacttggtataaagataataaggaaattaatatcgacgacattaagtattcacaaacgggaaaggaattaattattcataatccagagttagaagatagcggaagatacgactgttacgttcattacgacgacgttagaatcaagaatgatatcgtagtatcaagatgtaaaatacttacggttataccgtcacaagaccacaggtttaaactaatactagatccgaaaatcaacgtaacgataggagaacctgccaatataacatgcactgctgtgtcaacgtcattattgatcgacgatgtactgattgaatgggaaaatccatccggatggcttataggattcgattttgatgtatactctgttttaactagtagaggcggtatcaccgaggcgaccttgtactttgaaaatgttactgaagaatatataggtaatacatataaatgtcgtggacacaactattattttgaaaaaacccttacaactacagtagtattggagtaaatatacaatgcatttttatatacattactgaattattattactgaattattattactgaattattattaattatatcgtatttgtgctatagaatggatgaagatacgcgactatctaggtatttgtatctcaccgatagagaacatataaatgtagactctattaaacagttgtgtaaaatatcagatcctaatgcatgttatagatgtggatgtacggctttacatgagtacttttataattatagatcagtcaacggaaaatacaagtatagatacaacggttactatcaatattattcatctagcgattatgaaaattataatgaatattattatgatagaactggtatgaacagtgagagtgataatatatcaatcaaaacagaatatgaattctatgatgaaacacaagatcaaagtacacaactagtaggttacgacattaaactcaaaaccaatgaggatgattttatggctatgatagatcagtgggtgtccatgattatatagatgaatcaattaataaagtagtatatggaagagagtctcacgtaagatggcgggatatatggcaagaacataatgatggcgtatacagtataggaaaggagtgcatagataatatatacgaagacaaccataccgtagacgaattctacaagatagacagcgtatcagatgtagatgacgcggaacacatatctccgataactaaaaaaccatagaatcagttgatgataatacctacatttctaatcttccgtataccatcaaatacaaaatattcgagcaacaataagtattttttatacctttaaaactgataaataaattttttctagtgatattttggcaagatgagaatcctatttctcatcgctttcatgtatgggtgtgttcactcatatgttaacgcggttgaaaccaaatgtccaaatctagacattgtaacatcttctggagaatttcattgttcaggatgtgtggaacatatgcctgagtttagctatatgtattggttggcaaaggatatgaaatcggacgaggataccaagtttatagaacatctgggtgatggcatcaaagaagatgaaaccgttcgtaccacagatagtggaatcgtcactctacgtaaagtccttcatgtgactgatactaataaatttgataattataggttcacttgtgtcctcgctacgctagatggcatttataaaaagaatgtttgctgaagtagttgtgtgctactatttttatttatgatataatctaatggaattaatttgaattgatatttatccaatactaaagattatattagaatcaaattaatcttttatacgagaaaaaataacgacatacgtcgtcaacaaattaaactttttatttattagttaactagcttatagaacttgctcattgttatgtttctaaaacgggtacggcatataggacaattatccgacgcaccggtttctcttcgtgttctatgccatatattgatgcatgttatgcaaaatatatgagtacacgaatccaataaaccaaagtatctatcgttttgagtaaacaacttcatagcaaattccacattctttttctttacttactctatacacgtcctcgtatttatttagtattttgatgatatccaactcagaaatggttgttgtattattgggtgtatttggagtataggtattattagctatgtaccaatttaccaaccctcttaatattgattgataatcacatcggttatccaattaataactaaattgtagtgtatatatagaccatatatgtttctatttttttgacagttacgtatagtttcagtaagttttgattgttgtattcctgtatctctagataagttagtcatatagtcccttccggcgatacgttttttccaagcccgaaattgattagccaaatgtgtatttatttttgtgatattgatataatatttcggataatgcatactgttagtcttatatcatttggttcatctatgtattgtaatattgttacatgatctatagatgatgtattgattttggcaggatcgaattccatatccgcgactaaacagtgaaaaaaatgtaaatactttttaaattttaaattagtaaaacttttttttattttttatgattccaaaaatactgaatacaaagtcctaaattataaatatggagatcatactaccacaacttattattatgtatacaaggccggtgtaatagatagatatatataattctattacaccggcagacaattaccgaccggtatttgtcgttaccaacataccgtataatatgtaatatacaattccataacccattgacagttgttatacatcaaaattgcaattcttttgattacgatgttataagaatgtagttaattgatgtatgatgttaatgtgtcctctttcctcttataacatcgtaatcaaaaacttttttataatatatacctaataatgtgtcttaatagttctcgtgattcgtcaaacaatcattcttataaaatataataaagcaacgtaaaaacacataaaaataagcgtaactaataagacaatggatatttacgacgataaaggtctacagactattaaactgtttaataatgaatttgattgtataaggaatgacatcagagaattatttaaacatgtaactgattccgatagtatacaacttccgatggaagacaattctgatattatagaaaatatcagaaaaatactatatagacgattaaaaaatgtagaatgtgttgacatcgataacacaataacttttatgaaatacgatccaaatgatgataataagcgtacgtgttctaattgggtacccttaactaataactatatggaatattgtctagtaatatatttggaaacaccgatatgtggaggcaaaataaaattataccaccctacaggaaatataaagtcggataaggatattatgtttgcaaagactctagactttaaatcaacgaaagtgttaactggacgtaaaacaattgccgttctagacatatccgtttcatataatagatcaatgactactattcactacaacgacgacgttgatatagatatacatactgataaaaatggaaaagagttatgttattgttatataacaatagatgatcattacttggttgatgtggaaactataggagttatagtcaatagatctggaaaatgtctgttagtaaataaccatctaggtataggtatcgttaaagataaacgtataagcgatagttttggagatgtatgtatggatacaatatttgacttttctgaagcacgagagttattttcattaactaatgatgataacaggaatatagcatgggacactgataaactagacgatgatacagatatatggactcccgtcacagaagatgattacaaatttctttctagactagtattgtatgcaaaatctcaatcggatactgtatttgactattatgttcttactggtgatacggaaccacccactgtattcattttcaaggtaactagattttactttaatatgccgaaataaaaaatttttgtataatatctagaggtagaggtattgtttagataaatacaaataacatagatacatcgcatacttagcatttttataaatatacataagacatacactttatacatttttgtaaaaatactcataaaaaaatttataaaaattatggcacaaccatatcttgtataggtagtttagttcgtcgagtgaacctataaacagataatagacaacacataataatgcctactaatacaagcataataccgggagatgggatatatgacgttgtagtgtttgggttttctgaacgttgatagtctactaatactacatgctgacatctaatgcctgtataaccatgagagcatctacaatacataccgtcaatatctctagcgtggatacagtcaccgtgtaaacaatatccatctccctctggaccgcataatctgatagctggaatatctgttgtagcgtttgtaatttctggcaatgtcgtttcgatagcgttaccactatcggcgaatgatctgattatcatagcagcgaacaacaacatcagataatttatcaacatttttgatggattctgtgtttatgctgtttctcagtgtgtgtttatgacaagattgggaattttatattattaattcagtaatataaactaataatatattgttaattgtgtaaataatataaaaataacaatacaatattgaatgtgttgctgttaaaaatgtatgtgttaatataatagaataaaataaatgagtatgatcattttagataacgattgattttatcattaccgcttcattcttatattctttgcttacggaacctatatttagaaacatctactaacaattttttatgcttgcattattaatggtatgtaatatgattgattgtgtacgcaataccaatttgttaagtatgaatacggggtacaaacataaattgaaatttaacattatttatttatgatatatatcgttatcgttaggtctataccatggatatctttaaagaactaatcttaaaacaccctgatgaaaatgttttgatttctccagtttccattttatctactttatctattctaaatcatggagcagctggttctacagctgaacaactatcaaaatatatagagaatatgaatgagaatacacccgatgacaataatgatgacatggaggtagatattccgtattgtgcgacactagctaccgcaaataaaatatacggtagcgatagtatcgagttccacgcctccttcctacaaaaaataaaagacgattttcaaactgtaaactttaataatgctaaccaaacaaaggaactaatcaacgaatgggttaagacaatgacaaatggtaaaattaattccttattgactagtccgctatccattaatactcgtatgacagttgttagcgccgtccattttaaagcaatgtggaaatatccattttctaaacatcttacatatacagacaagttttatatttctaagaatatagttaccagcgttgatatgatggtgggtaccgagaataacttgcaatatgtacatattaatgaattattcggaggattctctattatcgatattccatacgagggaaactctagtatggtaattatactaccggacgacatagaaggtatatataacatagaaaaaaatataacagatgaaaaatttaaaaaatggtgtggtatgttatctactaaaagtatagacttgtatatgccaaagtttaaagtggaaatgacagaaccgtataatctggtaccgattttagaaaatttaggacttactaatatattcggatattatgcagattttagcaagatgtgtaatgaaactatcactgtagaaaaatttctacatacgacgtttatagatgttaatgaggagtatacagaagcatcggccgttacaggagtatttacgattaacttttcgatggtatatcgtacgaaggtctacataaaccatccattcatgtacatgattaaagacaccacaggacgtatactttttatagggaaatactgctatccgcaataaatataaacaaatagacttttataaagagtcttcaacgataagtatatcgacatactacttatgctgcgaaagattctgaacgagaacgactatctcaccctcttggatcatatccgcactgctaaatactaaatctccactacactttttatcatcttatgaggaatgattgccttcgtgaaataggaataattagcaccagaatagctatggattattgtggtagagagtgcactattctatgtcgtctactggatgaagatgtgacgtacaaaaaaataaaactagaaattgaaacgtgtcacaacttatcaaaacatatagatagacgaggaaacaatgcgctacattgttacgtctccaataaatgcgatacagacattaagattgttctctcgcggagtcgagagactttgtagaaacaacgaaggattaactccgctaggagtatacagtaagcatagatacgtaaaatctcagattgtgcatctactgatatccagctattcaaattcctctaacgaactcaagtcgaatataaatgatttcgatctgtattcggataatatcgacttacgtctgctaaaatacctaattgtggataaacggatacgtccgtccaagaatacgaattatgcaatcaatggtctcggattggtggatatatacgtaacgacgcctaatccgagaccagaagtattgctatggcttcttaaatcagaatgttacagcaccggttacgtatttcgtacctgtatgtacgacagtgatatgtgtaagaactctcttcattactatatatcgtctcatagagaatctcaatctctatccaaggatgtaattaaatgtttgatcgataacaatgtttccatccatggcagagacgaaggaggatctttacccatccaatactactggtctttctcaaccatagatatagagattgttaaattattattaataaaggatgtggacacgtgtagagtatacgacgtcagccctatattagaggcgtattatctaaacaagcgatttagagtaaccccatataatgtagacatggaaatcgttaatcttcttattgagagacgtcatactcttgtcgacgtaatgcgtagtattacttcgtacgattccagagaatataaccactacatcatcgataacattctaaagagatttagacaacaggatgaatccatcgtacaagccatactgataaactacttacattacggcgatatggtcgttcgatgcatgttagataacggacaacaactatcctctacacgactactttgttaataataatctcgtcgatgtaaacgtcgtaaggtttatcgtggaaaatatggacacgcggctgtaaatcacgtatcgaacaatggccgtctatgtatgtacggtctgatattatcgagatttaataattgcgggtatcactgttatgaaaccatactgatagatgtatttgatatactaagcaagtacatggatgatatagatatgatcgataactctactatattacgcggtcgatgtcaataatatacaatttgcaaagcggttattggaatatggagcgagtatcacgctcgataatcaatacggccatccagaaaagcagttacagaagagaaaacaaaacgaaatcgttgttctacaagatgtctctccctacgacgattactacgtaaaaaagatactagcctactgcctattaagggacgagtcattcgcggaactacatagtaaattctgtttaaacgaggactataaaagtgtatttatgaaaaatatatcattcgataagatagattccatcatcgtgacataagtcgcctcaaagagattcgaatctccgacaccgacctgtatacggtatcacagctatcttaaagccatacattcagacagtcacatttcatttcccatgtacgacgatctcatagaacagtgccatctatcgatggagcgtaaaagtaaactcgtcgacaaagcactcaataaattagagtctaccatcggtcaatctagactatcgtatttgcctccggaaattatgcgcaatatcatctaaacagtatgttgtacggaaagaaccattacaaatattatccatgatagaaagaaaatatctatatgattggagaagtaggaaacaggaacaagacaacgattactacattattaaatcatgaagtccgtattatactcgtatatattgtttctctcatgtataataataaacggaagagatatagcaccgcatgcaccatccgatggaaagtgtaaagacaacgaatacaaacgccataatttgtgtccgggaacatacgcttccagattatgcgatagcaagactaacacacgatgtacgccgtgtggttcgggtaccttcacatctcgcaataatcatttacccgcttgtctaagttgtaacggaagacgcgatcgtgtaacacgactcacaatagaatctgtgaatgctctcccggatattattgtcttctcaaaggatcatccggatgcaaggcatgtgtttcccaaacaaaatgtggaataggatacggagtatccggagacgtcatctgttctccgtgtggtctcggaacatattctcacaccgtctcttccgcagataaatgcgaacccgtacccagaaatacgtttaactatatcgatgtggaaattaacctgtatccagttaacgacacgtcgtgtactcggacgaccactaccggtctcagcgaatccatctcaacgtcggaactaactattactatgaatcataaagactgtaatcccgtatttcgtgatggatacttctccgttcttaataaggtagcgacttcaggtttctttacaggagaaaggtgtgcactctgaatttcgagattaaatgcaataacaaagattcttcctccaaacagttaacgaaagcaaagaatgatactatcatgccgcattcggagacagtaactctagtgggcgacatctatatactatatagtaataccaatactcaagactacgaaactgatacaatctcttatcatgtgggtaatgttctcgatgtcgatagccatatgcccggtagttgcgatatacataaactgatcactaattccaaacccacccactttttatagtaagtttttcacccataaataataaatacaataattaatttctcgtaaaagtagaaaatatattctaatttattgcacggtaaggaagtagaatcataaagaacagtactcaatcaatagcaattatgaaacaatatatcgtcctggcatgcatgtgcctggcggcagctgctatgcctgccagtcttcagcaatcatcctcatcctcctcctcgtgtacggaagaagaaaacaaacatcatatgggaatcgatgttattatcaaagtcacaaagcaagaccaaacaccgaccaatgataagatttgccaatccgtaacggaaattacagagtccgagtcagatccagatcccgaggtggaatcagaagatgattccacatcagtcgaggatgtagatcctcctaccacttattactccatcatcggtggaggtctgagaatgaactttggattcaccaaatgtcctcagattaaatccatctcagaatccgctgatggaaacacagtgaatgctagattgtccagcgtgtccccaggacaaggtaaggactctcccgcgatcactcatgaagaagctcttgctatgatcaaagactgtgaagtgtctatcgacatcagatgtagcgaagaagagaaagacagcgacatcaagacccatccagtactcgggtctaacatctctcataagaaagtgagttacgaagatatcatcggttcaacgatcgtcgatacaaaatgcgtcaagaatctagagtttagcgttcgtatcggagacatgtgcaaggaatcatctgaacttgaggtcaaggatggattcaagtatgtcgacggatcggcatctgaaggtgcaaccgatgatacttcactcatcgattcaacaaaactcaaagcgtgtgtctgaatcgataactctattcatctgaaattggatgagtagggttaatcgaacgattcaggcacaccacgaattaaaaaagtgtaccggacactatattccggtttgcaaaacaaaaatgttcttaactacattcacaaaaagttacctctcgcgacttcttctttttctgtctcaatagtgtgatacgattatgacactattcctattcctattcctatttcctttcagagtatcacaaaaatattaaacctctttctgatggtctcataaaaaaagttttacaaaaatatttttattctctttctctctttgatggtctcataaaaaaagttttacaaaaatatttttattctctttctctctttgatggtctcataaaaaaagttttacaaaaatatttttattctctttctctctttgatggtctcataaaaaaagttttacaaaaatatttttattctctttctctctttgatggtctcataaaaaaagttttacaaaaatatttttattctctttctctctttgatggtctcataaaaaaagttttacaaaaatatttttattctctttctctctttgatggtctcataaaaaaagttttacaaaaatatttttattctctttctctctttgatggtctcataaaaaaagttttacaaaaatatttttattctctttctctctttgatggtctcataaaaaaagttttacaaaaatatttttattctctttctctctttgatggtctcataaaaaaagttttacaaaaatatttttattctctttctctctttgatggtctcataaaaaaagttttacaaaaatatttttattctctttctctctttgatggtctcataaaaaaagttttacaaaaatatttttattctctttctctctttgatggtctcataaaaaagttttacaaaaatatttttattctctttctctctttgatggtctcataaaaaagttttacaaaaatatttttattctctttctctctttgatggtctcataaaaaaagttttacaaaaatatttttattctctttctctctttgatggtctcataa

SEQ ID NO: 2 - DNA, 186854 bp, Artificial Sequence
  LIVP complete genome
ttccactatctgtggtacgaacggtttcatcttctttgatgccatcacccagatgttctataaacttggtatcctcgtccgatttcatatcctttgccaaccaatacatatagctaaactcaggcatatgttccacacatcctgaacaatgaaattctccagaagatgttacaatgtctagatttggacatttggtttcaaccgcgttaacatatgagtgaacacacccatacatgaaagcgatgagaaataggattctcatcttgccaaaatatcactagaaaaaatttatttatcaattttaaaggtataaaaaatacttattgttgctcgaatattttgtatttgatggtatacggaagattagaaatgtaggtattatcatcaactgattctatggttttatgtattctatcatgtttcactattgcgttggaaataatatcatatgcttccacatatattttattttgttttaactcataatactcacgtaattctggattattggcatatctatgaataattttagctccatgatcagtaaatattaatgagaacatagtattaccacctaccattatttttttcatctcattcaattcttaattgcaaagatctatataatcattatagcgttgacttatggactctggaatcttagacgatgtacagtcatctataatcatggcatatttaatacattgttttatagcatagtcgttatctacgatgttagatatttctctcaatgaatcaatcacacaatctaatgtaggtttatgacataatagcattttcagcagttcaatgtttttagattcgttgatggcaatggctatacatgtatatccgttatttgatctaatgttgacatctgaaccggattctagcagtaaagatactagagattgtttattatatctaacagccttgtgaagaagtgtttctcctcgtttgtcaatcatgttaatgtctttaagataaggtaggcaaatgtttatagtactaagaattgggcaagcataagacatgtcacaaagacccttttttgtatgtataagtgtaaaaattataacatccatagttggatttacataggtgtccaatcgggatctctccatcatcgagataattgatggcatctcccttccttttttagtagatatttcatcgtgtaagaatcaatattaatatttctaaagtatccgtgtatagcctctttatttaccacagctccatattccactagagggatatcgccgaatgtcatatactcaattagtatatgttggaggacatccgagttcattgttttcaatatcaaagagatggtttccttatcatttctccatagtggtacaatactacacattattccgtgcggctttccattttccaaaaacaatttgaccaaatctaaatctacatctttattgtatctataatcactatttagataatcagccataattcctcgagtgcaacatgttagatcgtctatatatgaataagcagtgttatctattcctttcattaacaatttaacgatgtctatatctatatgagatgacttaatataatattgaagagctgtacaatagtttttatctataaaagacggcttgattccgtgattaattagacatttaacaacttccggacgcacatatgctctcgtatccgactctgaatacagatgagagatgatatacagatgcaatacggtaccgcaatttcgtagttgataatcatcatacgcgtatcagtactcgtcctcataaagaacactgcagccattttctatgaacaaatcaataattttagaaacaggatcattgtcattacataattttctataactgaacgatggttttcacatttaacactcaagtcaaatccatgttctaccaacacctttatcaagtcaacgtctacatttttggatttcatatagctgaatatattaaagttatttatgttgctaaatccagtggcttctagtagagccatcgctatatccttattaactttaacatgtctactatttgtgtattcttctaatggggtaagctgtctccaatttttgcgtaatggattagtgccactgtctagtagtagtttgacgacctcgacattattacaatgctcattaaaaaggtatgcgtgtaaagcattattcttgaattggttcctggtatcattaggatctctgtctttcaacatctgtttaagttcatcaagagccacctcctcattttccaaatagtcaaacattttgactgaatgagctactgtgaactctatacacccacacaactaatgtcattaaatatcatgtcaaaaacttgtacaattattaataaaaataatttagtgtttaaattttaccagttccagattttacacctccgttaatacctccattaaccccactggacgatcctcctccccacattccaccgccaccagatgtataagttttagatcctttattactaccatcatgtccatggataaagacactccacatgccgccactaccccctttagaagacatattaataagacttaaggacaagtttaacaataaaattaatcacgagtaccctactaccaacctacactattatatgattatagtttctatttttacagtaccttgactaaagtttctagtcacaagagcaatactaccaacctacactattatatgattatagtttctatttttataggaacgcgtacgagaaaatcaaatgtctaatttctaacggtagtgttgataaacgattgttatccgcggatacctcctctatcatgtcgtctattttcttactttgttctattaacttattagcattatatattatttgattataaaacttatattgcttattagcccaatctgtaaatatcggattattaacatatcgtttctttgtaggtttatttaacatgtacatcactgtaagcatgtccttaccatttattttaatttgacgcatatccgcaatttctttttcgcagtcggttataaattctatatatgatggatacatgctacatgtgtacttataatcgactaatatgaagtacttgatacatattttcagtaacgatttattattaccacctatgaataagtacctgtgatcgtctaggtaatcaactgttttcttaatacattcgatggttggtaatttactcagaataatttccaatatcttaatatataattctgctatttctgggatatatttatctgccagtataacacaaatagtaatacatgtaaacccatattttgttattatattaatgtctgcgccattatctattaaccattctactaggctgacactatgcgactcaatacaatgataaagtatactacatccatgtttatctattttgtttatatcatcaatatacggcttacaaagttttagtatcgataacacatccaactcacgcatagagaaggtagggaataatggcataatatttattaggttatcatcattgtcattatctacaactaagtttccattttttaaaatatactcgacaactttaggatctctattgccaaatttttgaaaatatttatttatatgcttaaatctatataatgtagctccttcatcaatcatacatttaataacattgatgtatactgtatgataagatacatattctaacaatagatcttgtatagaatctgtatatcttttaagaattgtggatattaggatattattacataaactattacacaattctaaaatataaaacgtatcacggtcgaataatagttgatcaactatataattatcgattttgtgatttttcttcctaaactgtttacgtaaatagttagatagaatattcattagttcatgaccactatagttactatcgaataacgcgtcaaatatttcccgtttaatatcgcatttgtcaagataataatagagtgtggtatgttcacgataagtataataacgcatctctttttcgtgtgaaattaaatagtttattacgtccaaagatgtagcataaccatcttgtgacctagtaataatataataatagagaactgttttacccattctatcatcataatcagtggtgtagtcgtaatcgtaatcgtctaattcatcatcccaattataatattcaccagcacgtctaatctgttctattttgatcttgtatccatactgtatgttgctacatgtaggtattcctttatccaataatagtttaaacacatctacattgggatttgatgttgtagcgtatttttctacaatattaataccatttttgatactatttatttctatacctttcgaaattagtaatttcaataagtctatattgatgttatcagaacatagatattcgaatatatcaaaatcattgatatttttatagtcgactgacgacaataacaaaatcacaacatcgtttttgatattattatttttcttggtaacgtatgcctttaatggagtttcaccatcatactcatataatggatttgcaccactttctatcaatgattgtgcactgctggcatcgatgttaaatgttttacaactatcatagagtatcttatcgttaaccatgattggttgttgatgctatcgcattttttggtttctttcatttcagttatgtatggatttagcacgtttgggaagcatgagctcatatgatttcagtactgtagtgtcagtactattagtttcaataagatcaatctctagatctatagaatcaaaacacgataggtcagaagataatgaatatctgtaggcttcttgttgtactgtaacttctggttttgttagatggttgcatcgtgctttaacgtcaatggtacaaattttatcctcgctttgtgtatcatattcgtccctactataaaattgtatattcagattatcatgcgatgtgtatacgctaacggtatcaataaacggagcacaccatttagtcataaccgtaatccaaaaatttttaaagtatatcttaacgaaagaagttgtgtcattgtctacggtgtatggtactagatcctcataagtgtatatatctagagtaatgtttaatttattaaatggttgataatatggatcctcgtgacaatttccgaagatggaaataagacataaacacgcaataaatctaattgcggacatggttactccttaaaaaaatacgaataatcaccttggctatttagtaagtgtcatttaacactatactcatattaatccatggactcataatctctatacgggattaacggatgttctatatacggggatgagtagttctcttctttaactttatactttttactaatcatatttagactgatgtatgggtaatagtgtttgaagagctcgttctcatcatcagaataaatcaatatctctgtttttttgttatacagatgtattacagcctcatatattacgtaatagaacgtgtcatctaccttattaactttcaccgcatagttgtttgcaaatacggttaatcctttgacctcgtcgatttccgaccaatctgggcgtataatgaatctaaactttaattgcttgtaatcattcgaaataatttttagtttgcatccgtagttatcccctttatgtaactgtaaatttctcaacgcgatatctccattaataatgatgtcgaattcgtgctgtatacccatactgaatggatgaacgaataccgacggcgttaatagtaatttactttttcatctttacatattgggtactagttttactatcataagtttataaattccacaagctactatggaataagccaaccatcttagtataccacacatgtcttaaagtttattaattaattacatgttgttttatatatatcgctacgaatttaaagagaaattagtttaggaagaaaaattatctatctacatcatcacgtctctgtattctacgatagagtgctactttaagatgcgacagatccgtgtcatcaaatatatactccattaaaatgattattccggcagcgaacttgatattggatatatcacaacctttgttaatatctacgacaatagacagcagtcccatggttccataaacagtgagtttatctttctttgaagagatattttgtagagatcttataaaactgtcgaatgacatcgcatttatatctttagctaaatcgtatatgttaccatcgtaatatctaaccgcgtctatcttaaacgtttccatcgctttaaagacgtttccgatagatggtctcatttcatcagtcatactgagccaacaaatataatcgtgtataacatctttgatagaatcagactctaaagaaaacgaatcggctttattatacgcattcatgataaacttaatgaaaaatgtttttcgttgtttaagttggatgaatagtatgtcttaataattgttattatttcattaattaatatttagtaacgagtacactctataaaaacgagaatgacataactaatcataactagttatcaaagtgtctaggacgcgtaattttcatatggtatagatcctgtaagcattgtctgtattctggagctattttctctatcgcattagtgagttcagaatatgttataaatttaaatcgaataacgaacataactttagtaaagtcgtctatattaactcttttattttctagccatcgtaataccatgtttaagatagtatattctctagttactacgatctcatcgttgtctagaatatcacatactgaatctacatccaattttagaaattggtctgtgttacatatctcttctatattattgttgatgtattgtcgtagaaaactattacgtagaccattttctttataaaacgaatatatagtactccaattatctttaccgatatatttgcacacataatccattctctcaatcactacatctttaagattttcgttgttaagatatttggctaaactatataattctattagatcatcaacagaatcagtatatatttttctagatccaaagacgaactctttggcgtcctctataatattcccagaaaagatattttcgtgttttagtttatcgagatctgatctgttcatatacgccatgattgtacggtacgttatgataaccgcataaaataaaaatccattttcatttttaaccaatactattcataattgagattgatgtaatactttgttactttgaacgtaaagacagtacacggatccgtatctccaacaagcacgtagtaatcaaatttggtgttgttaaacttcgcaatattcatcaatttagatagaaacttatactcatcatctgttttaggaatccatgtattattaccactttccaacttatcattatcccaggctatgtttcgtccatcatcgttgcgcagagtgaataattcttttgtattcggtagttcaaatatatgatccatgcatagatcggcaaagctattgtagatgtgatttttcctaaatctaatataaaactcgtttactagcaaacactttcctgatttatcgaccaagacacatatggtttctaaatctatcaagtggtggggatccatagttatgacgcagtaacatatattattacattcttgactgtcgctaatatctaaatatttattgttatcgtattggattctgcatatagatggcttgtatgtcaaagatatagaacacataaccaatttatagtcgcgctttacattctcgaatctaaagttaagagatttagaaaacattatatcctcggatgatgttatcactgtttctggagtaggatatattaaagtctttacagatttcgtccgattcaaataaatcactaaataatatcccacattatcatctgttagagtagtatcattaaatctattatattttatgaaagatatatcactgctcacctctatatttcgtacatttttaaactgtttgtataatatctctctgatacaatcagatatatctattgtgtcggtagacgataccgttacatttgaattaatggtgttccattttacaacttttaacaagttgaccaattcatttctaatagtatcaaactctccatgattaaatattttaatagtatccattttatatcactacggacacaaagtagctgacataaaccattgtataatttttatgttttatgtttattagcgtacacattttggaagttccggcttccatgtatttcctggagagcaagtagatgatgaggaaccagatagtttatatccgtacttgcacttaaagtctacattgtcgttgtatgagtatgatcttttaaacccgctagacaagtatccgtttgatattgtaggatgtggacatttaacaatctgacacgtgggtggatcggaccattctcctcctgaacacaggacactagagttaccaatcaacgaatatccactattgcaactataagttacaacgctcccatcggtataaaaatcctcgtatccgttatgtcttccgttggatatagatggaggggattggcatttaacagattcacaaataggtgcctcgggattccataccatagatccagtagatcctaattcacaatacgatttagattcaccgatcaactgatatccgctattacaagagtacgttatactagagccaaagtctactccaccaatatcaagttggccattatcgatatctcgaggcgatgggcatctccgtttaatacattgattaaagagtgtccatccagtacctgtacatttagcatatataggtcccattttttgctttctgtatccaggtagacatagatattctatagtgtctcctatgttgtaattagcattagcatcagtctccacactattcttaaatttcatattaatgggtcgtgacggaatagtacagcatgatagaacgcatcctattcccaacaatgtcaggaacgtcacgctctccaccttcatatttatttatccgtaaaaatgttatcctggacatcgtacaaataataaaaagcccatatatgttcgctattgtagaaattgtttttcacagttgctcaaaaacgatggcagtgacttatgagttacgttacactttggagtctcatctttagtaaacatatcataatattcgatattacgagttgacatatcgaacaaattccaagtatttgattttggataatattcgtattttgcatctgctataattaagatataatcaccgcaagaacacacgaacatctttcctacatggttaaagtacatgtacaattctatccatttgtcttccttaactatatatttgtatagataattacgagtctcgtgagtaattccagtaattacatagatgtcgccgtcgtactctacagcataaactatactatgatgtctaggcatgggagacttttttatccaacgatttttagtgaaacattccacatcgtttaatactacatatttctcatacgtggtataaactccacccattacatatatatcatcgtttacgaataccgacgcgcctgaatatctaggagtaattaagtttggaagtcttatccatttcgaagtgccgtgtttcaaatattctgccacacccgttgaaatagaaaattctaatcctcctattacatataactttccatcgttaacacaagtactaacttctgattttaacgacgacatattagtaaccgttttccattttttcgttttaagatctacccgcgatacggaataaacatgtctattgttaatcatgccgccaataatgtatagacaattatgtaaaacatttgcattatagaattgtctatctgtattaccgactatcgtccaatattctgttctaggagagtaatgggttattgtggatatataatcagagtttttaatgactactatattatgttttataccatttcgtgtcactggctttgtagatttggatatagttaatcccaacaatgatatagcattgcgcatagtattagtcataaacttgggatgtaaaatgttgatgatatctacatcgtttggatttttatgtatccactttaataatatcatagctgtaacatcctcatgatttacgttaacgtcttcgtgggataagatagttgtcagttcatcctttgataattttccaaattctggatcggatgtcaccgcagtaatattgttgattatttctgacatcgacgcattatatagttttttaattccatatcttttagaaaagttaaacatccttatacaatttgtgaaattaatattatgaatcatagtttttacacatagatctactacaggcggaacatcaattattatggcagcaactagtatcatttctacattgtttatggtgatgtttatcttcttccagcgcatatagtctaatagcgattcaaacgcgtgatagtttataccattcaatataatcgcttcatcctttagatggtgatcctgaatgcgtttaaaaaaattatacggagacgccgtaataatttccttattcacttgtataatttccccattgatagaaaatattacgctttccattcttaaagtactataagtaattatagtataatgtaaacgtttatatattcaatatttttataaaaatcattttgacattaattcctttttaaatttccgtctatcatctatagaaacgtattctatgaatttataaaatgcttttacgtgtcctatcgtaggcgatagaaccgctaaaaagcctatcgaatttctacaaaagaatctgttatatggtatagggagagtataaaacattaaatgtccgtacttattaaagtattcagtagccaatcctaactctttcgaatacttattaatggctcttgttctgtacgaatctatttttttgaacaacggacctagtggtatatcttgttctatgtatctaaaataatgtctgactagatccgttagtttaatatccgcagtcatcttgtctagaatggcaaatctaactgcgggtttaggctttagtttagtttctatatctacatctatgtctttatctaacaccaaaaatataatagctaatattttattacaatcatccggatattcttctacgatctcactaactaatgtttctttggttatactagtatagtcactatcggacaaataaagaaaatcagatgatcgatgaataatacatttaaattcatcatctgtaagatttttgagatgtctcattagaatattattagggttagtactcattatcattcggcagctattacttattttattatttttcaccatatagatcaatcattagatcatcaaaatatgtttcaatcatcctaaagagtatggtaaatgactcttcccatctaatttctgaacgttcaccaatgtctctagccactttggcactaatagcgatcattcgcttagcgtcttctatattattaactggttgattcaatctatctagcaatggaccgtcggacagcgtcattctcatgttcttaatcaatgtacatacatcgccgtcatctaccaattcatccaacaacataagctttttaaaatcatcattataataggtttgatcgttgtcatttctccaaagaatatatctaataagtagagtcctcatgcttagttaacaactattttttatgttaaatcaattagtacaccgctatgtttaatacttattcatattttagtttttaggattgagaatcaatacaaaaattaatgcatcattaattttagaaatacttagtttccacgtagtcaatgaaacatttgaactcatcgtacaggacgttctcgtacaggacgtaactataaaccggtttatatttgttcaagatagatacaaatccgataactttttttacgaattctacgggatccactttaaaagtgtcataccgggttctttttatttttttaaacagatcaatggtgtgatgttgattaggtcttttacgaatttgatatagaatagcgtttacatatcctccataatggtcaatcgccatttgttcgtatgtcataaattctttaattatatgacactgtgtattatttagttcatccttgttcattgttaggaatctatccaaaatggcaattatactagaactataggtgcgttgtatacacatattgatgtgtctgtttatacaatcaatgctactaccttcgggtaaaattgtagcatcatataccatttctagtactttaggttcattattatccattgcagaggacgtcatgatcgaatcataaaaaaatatattatttttatgttattttgttaaaaataatcatcgaatacttcgtaagatactccttcatgaacataatcagttacaaaacgtttatatgaagtaaagtatctacgatttttacaaaagtccggatgcataagtacaaagtacgcgataaacggaataataatagatttatctagtctatctttttctatagctttcatagttagatacatggtctcagaagtaggattatgtaacatcagcttcgataaaatgactgggttatttagtcttacacattcgctcatacatgtatgaccgttaactacagagtctacactaaaatgattgaacaatagatagtctaccattgtttcgtattcagatagtacagcgtagtacatggcatcttcacaaattatatcattgtctaatagatatttgacgcatcttatggatcccacttcaacagccatcttaaaatcggtagaatcatattgctttcctttatcattaataatttctagaacatcatctctatcataaaagatacaaatattaactgtttgatccgtaataacattgctagtcgatagcaatttgttaataagatgcgctgggctcaatgtcttaataagaagtgtaagaggactatctccgaatttgttttgtttattaacatccgttgatggaagtaaaagatctataatgtctacattcttgactgttttagagcatacaatatggagaggtgtatttccatcatgatctggttttgagggactaattcctagtttcatcatccatgagattgtagaagcttttggattgtctgacataagatgtctatgaatatgatttttgccaaatttatccactatcctggcttcgaatccgatggacattatttttttaaacactctttctgaaggatctgtacacgccaacaacggaccacatccttcttcatcaaccgagttgttaatcttggctccatactgtaccaataaatttattctctctatgacttcatcatctgttcccgagagataatatagaggcgttttatgctgtttatcacacgcgtttggatctgcgccgtgcgtcagcagcatcgcgactattctattattattaattttagaagctatatgcaatggataatttccatcatcatccgtctcatttggagagtatcctctatgaagaagttcttcgacaaatcgttcatctagtcctttaattccacaatacgcatgtagaatgtgataattatttccagaaggttcgatagcttgtagcatattcctaaatacatctaaatttttactattatatttggcataaagagatagataatactcggccgacataatgttgtccattgtagtataaaaattaatatttctatttctgtatatttgcaacaatttactctctataacaaatatcataacttagttcttttatgtcaagaaggcactggtttagttcatctataaatgtcacgccataactaccacgcatgccatactcagaattatgataaagatatttatccttggggtgtaggtaatggggattaatctttgttggatcagtctctaagttaacacatgtcacacatgatccatttatagttatatcacacgatgatgatttatgaattgattccggaagatcgctatcgtattttgtggttccacaattcatttccatacatgttattgtcacactaatattatgatgaactttatctagccgctgagtggtaaacaacagaacagatagtttattatctttaccaacaccctcagccgctgccacaaatctctgatccgtatccatgatggtcatgtttatttctagtccgtatccagtcaacactatgttagcatttctgtcgatatagctttcactcatatgacactcaccaataatagtagaattaatgtcgtaatttacaccaatagtgagttcggcggcaaagtaccaataccggtaatcttgtcgaggaggacatatagtattcttgtattctaccgaatacccgagagatgcgatacaaaagagcaagactaatttgtaaaccatcttactcaaaatatgtaacaatagtacgatgcaatgagtaagacaataggaaatctatcttatatacacataattattctatcaattttaccaattagttagtgtaatgttaacaaaaatgtgggagaatctaattagtttttctttacacaattgacgtacatgagtctgagttccttgtttttgctaattatttcatccaatttattattcttgacgatatcgagatcttttgtataggagtcaaacttgtattcaacatgcttttctataatcattttagctatttcggcatcatccaatagtacattttccagattagcagaatagatattaatgtcgtatttgaacagagcctgtaacatctcaatgtctttattatctatagccaatttaatgtccggaatgaagagaagggaattattggtgtttgtcgacgtcatatagtcgagcaagagaatcatcatatccacgtgtccattttttatagtgatgtgaatacaactaaggagaatagccagatcaaaagtagatggtatctctgaaagaaagtaggaaacaatacttacatcattaagcatgacggcatgataaaatgaagttttccatccagttttcccatagaacatcagtctccaatttttcttaacaaacagttttaccgtttgcatgttaccactatcaaccgcataatacaatgcggtgtttcccttgtcatcaaattgtgaatcatccagtccactgaatagcaaaatctttactattttggtatcttccaatgtggctgcctgatgtaatggaaattcattctctagaagatttttcaatgctccagcgttcaacaacgtacatactagacgcacgttattatcagctattgcataatacaaggcactatgtccatggacatccgccttaaatgtatctttactagagagaaagcttttcagctgcttagacttccaagtattaattcgtgacagatccatgtctgaaacgagacgctaattagtgtatattttttcattttttataattttgtcatattgcaccagaattaataatatctttaatagatctgattagtagatacatggctatcgcaaaacaacatatacacatttaataaaaataatatttattaagaaaattcagatttcacgtacccatcaatataaataaaataatgattccttacaccgtacccatattaaggagattccaccttacccataaacaatataaatccagtaatatcatgtctgatgatgaacacaaatggtgtattaaattccagtttttcaggagatgatctcgccgtagctaccataatagtagatgcctctgctacagttccttgttcgtcgacatctatctttgcattctgaaacattttataaatatataatgggtccctagtcatatgtttaaacgacgcattatctggattaaacatactaggagccatcatttcggctatcgacttaatatccctcttattttcgatagaaaatttagggagtttaagattgtacactttattccctaattgagacgaccaatagtctaattttgcagccgtgatagaatctgtgaaatgggtcatattatcacctattgccaggtacatactaatattagcatccttatacggaaggcgtaccatgtcatattctttgtcatcgattgtgattgtatttccttgcaatttagtaactacgttcatcatgggaaccgttttcgtaccgtacttattagtaaaactagcattgcgtgttttagtgatatcaaacggatattgccatatacctttaaaatatatagtattaatgattgcccatagagtattattgtcgagcatattagaatctactacattagacataccggatctacgttctactatagaattaattttattaaccgcatctcgtctaaagtttaatctatataggccgaatctatgatattgttgataatacgacggtttaatgcacacagtattatctacgaaactttgataagttagatcagtgtacgtatatttagatgttttcagcttagctaatcctgatattaattctgtaaatgctggacccagatctctttttctcaaatccatagtcttcaataattctattctagtattacctgatgcaggcaatagcgacataaacatagaaaacgaataaccaaacggtgagaagacaatattatcatcttgaatatttttatacgctactataccggcattggtaaatccttgtagacgataggcggacgctgaacacgctaacgatagtatcaataacgcaatcatgattttatggtattaataattaaccttatttttatgttcggtataaaaaaattattgatgtctacacatccttttgtaattgacatctatatatccttttgtataatcaactctaatcactttaacttttacagttttccctaccagtttatccctatattcaacatatctatccatatgcatcttaacactctctgccaagatagcttcagagtgaggatagtcaaaaagataaatatatagagcataatcattctcgtatactctgccctttattacatcacccgcattgggcaacgaataacaaaatgcaagcatcttgttaacgggctcgtaaattgggataaaaattatgtttttattgtcttatatctattttattcaagagaatattcaggaatttctttttccggttgtatctcgtcgcagtatatatcatttgtacattgtttcatattttttaatagtttacaccttttagtaggactagtatcgtacaattcatagctgtattttgaattccaatcacgcataaaaatatcttccaattgttgacgaagacctaatccatcatccggtgtaatattaatagatgctccacatgtatccgtaaagtaatttcctgtccaatttgaggtacctatataggccgttttatcggttaccatatatttggcatggtttaccctagaatacggaatgggaggatcagcatctggtacaataaatagctttacttctatatttatgtttttagattttagcatagcgatagatcttaaaaagtttctcatgataaacgaagatcgttgccagcaactaatcaatagcttaacggatacttgtctgtctatagcggatcttcttaattcatcttctatataaggccaaaacaaaattttacccgccttcgaataaataatagggataaagttcataacagatacataaacgaatttactcgcatttctaatacatgacaataaagcggttaaatcattggttctttccatagtacatagttgttgcggtgcagaagcaataaatacagagtgtggaacgccgcttacgttaatactaagaggatgatctgtattataatacgacggataaaagtttttccaattatatggtagattgttaactccaagataccagtatacctcaaaaatttgagtgagatccgctgccaagttcctattattgaagatcgcaatacccaattccttgacctgagttagtgatctccaatccatgttagcgcttcctaaataaatatgtgtattatcagatatccaaaattttgtatgaagaactcctcctaggatatttgtaatatctatgtatcgtacttcaactccggccatttgtagtctttcaacatcctttaatggtttgttagatttattaacggctactctaactcgtactcctcttttgggtaattgtacaatctcgtttaatattatcgtgccgaaattcgtacccacttcatccgataaactccaataaaaagatgatatatctagtgtttttgtggtattggatagaatttccctccacatgttaaatgtagacaaatatactttatcaaattgcatacctataggaatagtttctgtaatcactgcgattgtattatccggattcattttatttgttaaaagaataatcctatatcacttcactctattaaaaatccaagtttctatttctttcatgactgattttttaacttcatccgtttccttatgaagatgatgtttggcaccttcataaatttttatttctctattacaatttgcatgttgcatgaaataatatgcacctaaaacatcgctaatcttattgtttgttccctggagtatgagagtcgggggggtgttaatcttggaaattatttttctaaccttgttggtagccttcaagacctgactagcaaatccagccttaattttttcatgattgactaatgggtcgtattggtatttataaactttatccatatctctagatactgattctggacatagctttccgactggcgcatttggtgtgatggttcccataagtttggcagctagcagattcagtcttgaaacagcatctgcattaactagaggagacattagaatcattgctgtaaacaagtttggattatcgtaagaggctagctcccatggaatgacccaataagtagatttaatagttaccacgtgctgtaccaaagtcatcaatcatcattttttcaccattacttcttccatgtccaatatgatcatgtgagaatactaaaattcctaacgatgatatgttttcagctagttcgtcataacgtccagaatgtttaccagctccatgacttatgaatactaatgccttaggatatgtaataggtttccaatatttacaatatatgtaatcattgtccagattgaacatacagtttgcactcatgattcacgttatataactatcaatattaacagttcgtttgatgatcatattatttttatgttttattgataattgtaaaaacatacaattaaatcaatatagaggaaggagacggctactgtcttttgtaagatagtcatggcgactaaattagattatgaggatgctgttttttactttgtggatgatgataaaatatgtagtcgcgactccatcatcgatctaatagatgaatatattacgtggagaaatcatgttatagtgtttaacaaagatattaccagttgtggaagactgtacaaggaattgatgaagttcgatgatgtcgctatacggtactatggtattgataaaattaatgagattgtcgaagctatgagcgaaggagaccactacatcaattttacaaaagtccatgatcaggaaagtttattcgctaccataggaatatgtgctaaaatcactgaacattggggatacaaaaagatttcagaatctagattccaatcattgggaaacattacagatttgatgaccgacgataatataaacatcttgatactttttctagaaaaaaaattgaattgatgatataggggtcttcataacgcataattattacgttagcattctatatccgtgttaaaaaaaattatcctatcatgtatttgagagttttatatgtagcaaacatgatagctgtgatgccaataagctttagatattcacgcgtgctagtgttagggatggtattatctggtggtgaaatgtccgttatataatctacaaaacaatcatcgcatatagtatgcgatagtagagtaaacatttttatagtttttactggattcatacatcgtctacccaattcggttataaatgaaattgtcgccaatcttacacccaaccccttgttatccattagcatagtattaacttcgttatttatgtcataaactgtaaatgattttgtagatgccatatcatacatgatattcatgtccctattataatcattactaactttatcacaatatatgttgataatatctatatatgatctagtctttgtgggcaactgtctatacaagtcgtctaaacgttgtttactcatatagtatcgaacagccatcattacatggtcccgttccgttgatagataatcgagtatgttagtggacttgtcaaatctatataccatattttctggaagtggatatacatagtcgtgatcaacattattgctagcctcatcttctatatcctgtactataccattatctatatcatctacataatctatgatattattacacataaacatcgacaacatactattgtttattatctaagtcctgttgatccaaacccttgatctcctctatttgtactatctagagattgtacttcttccagttctggataatatatacgttgatagattagctgagctattctatctccagtatttacattaaacgtacattttccattattaataagaatgactcctatgtttcccctataatcttcgtctattacaccacctcctatatcaatgccttttagtgacagaccagacctaggagctattctaccatagcagaacttaggcatggacatactaatatctgtcttaattaactgtctttctcctggagggatagtataatcgtaagcgctatacaaatcatatccggcagcacccggcgattgcctagtaggagatttagctctgttagtttccttaacaaatctaactggtgagttaatattcatgttgaacataaaactaatattttatttcaaaattatttaccatcccatatattccatgaataagtgtgatgattgtacacttctatagtatctatatacgatccacgataaaatcctcctatcaatagcagtttattatccactatgatcaattctggattatccctcggataaataggatcatctatcagagtccatgtattgctggattcacaataaaattccgcatttctaccaaccaagaataaccttctaccgaacactaacgcgcatgatttataatgaggataataagtggatggtccaaactgccactgatcatgattgggtagcaaatattctgtagttgtatcagtttcagaatgtcctcccattacgtatataacattgtttatggatgccactgctggattacatctaggtttcagaagactcggcatattaacccaagcagcatccccgtggaaccaacgctcaacagatgtgggatttggtagacctcctactacgtataatttattgttagcgggtatcccgctagcatacagtctggggctattcatcggaggaattggaatccaattgtttgatatataatttaccgctatagcattgttatgtatttcattgttcatccatccaccgatgagatatactacttctccaacatgagtacttgtacacatatggaatatatctataatttgatccatgttcataggatactctatgaatggatacttgtatgatttgcgtggttgtttatcacaatgaaatattttggtacagtctagtatccattttacattatttatacctctgggagaaagataatttgacctgattacatttttgataaggagtagcagatttcctaatttatttcttcgctttatataccacttaatgacaaaatcaactacataatcctcatctggaacatttagttcatcgctttctagaataagtttcatagatagataatcaaaattgtctatgatgtcatcttccagttccaaaaagtgtttggcaataaagtttttagtatgacataagagattggatagtccgtattctatacccatcatgtaacactcgacacaatattcctttctaaaatctcgtaagataaagtttatacaagtgtagatgataaattctacagaggttaatatagaagcacgtaataaattgacgacgttatgactatctatatatacctttccagtatacgagtaaataactatagaagttaaactgtgaatgtcaaggtctagacaaaccctcgtaactggatctttatttttcgtgtatttttgacgtaaatgtgtgcgaaagtaaggagataactttttcaatatcgtagaattgactattatattgcctcctatggcatcaataattgttttgaatttcttagtcatagacaatgctaatatattcttacagtacacagtattgacaaatatcggcatttatgtttctttaaaagtcaacatctagagaaaaatgattatctttttgagacataactcccattttttggtattcacccacacgtttttcgaaaaaattagtttttccttccaatgatatattttccatgaaatcaaacggattggtaacattataaatttttttaaatcccaattcagaaatcaatctatccgcgacgaattctatatatgttttcatcatttcacaattcattcctataagtttaactggaagagccgcagtaagaaattcttgttcaatggatactgcatctgttataatagatctaacggtttcttcactcggtggatgcaataaatgtttaaacatcaaacatgcgaaatcgcagtgcagaccctcgtctctactaattagttcgttggaaaacgtgagtccgggcattaggccacgctttttaagccaaaatatggaagcgaatgatccggaaaagaagattccttctactgcagcaaaggcaataagtctctctccataaccggcgctgtcatgtatccacttttgagcccaatcggccttcttttttacacaaggcatcgtttctatggcattaaagagatagtttttttcattactatctttaacataagtatcgatcaaaagactatacatttccgaatgaatgttttcaatggccatctgaaatccgtagaaacatctagcctcggtaatctgtacttctgtacaaaatcgttccgccaaattttcattcactattccgtcactggctgcaaaaaacgccaatacatgttttataaaatatttttcgtctggtgttagtttattccaatcattgatatctttagatatatctacttcttccactgtccaaaatgatgcctctgcctttttatacatgttccagatgtcatgatattggattgggaaaataacaaatctatttggatttggtgcaaggatgggttccataactaaattaacaataacaataaattttttttcagttatctatatgcctgtacttggattttttgtacatcgatatcgccgcaatcactacaataattacaagtattattgatagcattgttattagtactatcataattaaattatctacattcatgggtgctgaataatcgttattatcatcattatcattttgtaattgtgacatcatactagataaatcgtttgcgagattgttgtgggaagcgggcatggaggatgcattatcattattatttaacgccttccatttggattcacaaatgttacgcacattcaacattttatggaaactataattttgtgaaaacaaataacaagaaaactcgtcatcgttcaaatttttaacgatagtaaaccgattaaacgtcgagctaatttctaacgctagcgactctgttggatatgggtttccagatatatatcttttcagttcccctacgtatctataatcatctgtaggaaatggaagatatttccatttatctactgttcctaatatcatatgtggtggtgtagtagaaccattaagcgcgaaagatgttatttcgcatcgtattttaacttcgcaataatttctggttagataacgcactctaccagtcaagtcaatgatattagcctttacagatatattcatagtagtcgtaacgatgactccatcttttagatgcgatactcctttgtatgtaccagaatcttcgtacctcaaactcgatatatttaaacaagttaatgagatattaacgcgttttatgaatgatgatatataaccagaagttttatcctcggtggctagcgctataaccttatcattataataccaactagtgtgattaatatgtgacacgtcagtgtgggtacaaatatgtacattatcgtctacgtcgtattcgatacatccgcatacagccaacaaatataaaatgacaaatactctaacgccgttcgtacccatcttgatgcggtttaataaatgttttgatttcaatttattgtaaaaaaagattcggttttatactgttcgatattctcattgcttatattttcatctatcatctccacacagtcaaatccgtggttagcatgcacctcatcaaccggtaaaagactatcggactcttctatcattataactctagaatatttaatttggtcattattaatcaagtcaattatcttatttttaacaaacgtgagtattttactcattttttataaaaacttttagaaatatacagactctatcgtgtgtctatatcttctttttatatccaatgtatttatgtctgatttttcttcatttatcatatataatggtccaaattctacacgtgcttcggattcatccagatcattaaggttcttataattgtaacatccttctcttccctcttctacatcttccttcttattcttattcttagcgtcacagaatctaccacagcaggatcccatgacgagcgtcatattaaactaatccattttcaattataatatatgattagtaatgaccattaaaataaaaaatattcttcataaccggcaagaaagtgaaaagttcacattgaaactatgtcagtagtatacatcatgaaatgatgatatatatatactctattttggtggaggattatatgatataattcgtggataatcatttttaagacacatttctttattcgtaaatcttttcacgttaaatgagtgtccatattttgcaatttcttcatatgatggcggtgtacgtggacgaggctgctcctgttcttgttgtggtcgccgactgtcgtgtctgcgtttagatccctccattatcgcgattgcgtagatggagtactattttataccttgtaattaaatttttttattaattaaacgtataaaaacgttccgtatctgtatttaagagccagatttcgtctaatagaacaaatagctacagtaaaaataactagaataattgctacacccactagaaaccacggatcgtaatacggcaatcggttttcgataataggtggaacgtatattttatttaaggacttaacaattgtctgtaaaccacaatttgcttccgcggatcctgtattaactatctgtaaaagcatatgttgaccgggcggagccgaacattctccgatatctaatttctgtatatctataatattattaacctccgcatacgcattacagttcttttctagcttggataccgcactaggtacatcgtctagatctattcctatttcctcagcgatagctcttctatccttttccggaagcaatgaaatcacttcaataaatgattcaaccatgagtgtgaaactaagtcgagaattactcatgcatttgttagttattcggagcgcgcaatttttaaactgtcctataacctctcctatatgaatagcacaagtgacattagtagggatagaatgttgagctaatttttgtaaataactatctataaaaagattatacaaagttttaaactctttagtttccgccatttatccagtctgagaaaatgtctctcataataaatttttccaagaaactaattgggtgaagaatggaaacctttaatctatatttatcacagtctgttttggtacacatgatgaattcttccaatgccgtactaaattcgatatctttttcgatttctggatatgtttttaataaagtatgaacaaagaaatggaaatcgtaataccagttatgtttaactttgaaattgttttttattttcttgttaatgattccagccacttgggaaaagtcaaagtcgtttaatgccgatttaatacgttcattaaaaacaaactttttatcctttagatgaattattattggttcattggaatcaaaaagtaagatattatcgggtttaagatctgcgtgtaaaaagttgtcgcaacagggtagttcgtagattttaatgtataacagagccatctgtaaaaagataaactttatgtattgtaccaaagatttaaatcctaatttgatagctaactcggtatctactttatctgccgaatacagtgctaggggaaaaattataatgtttcctctttcatattcgtagttagttctcttttcatgttcgaaaaagtgaaacatgcggttaaaatagtttataacattaatattactgttaataactgccggataaaagtgggatagtaatttcacgaatttgatactgtcctttctctcgttaaacgcctttaaaaaaactttagaagaatatctcaatgagagttcctgaccatccatagtttgtatcaataatagcaacatatgaagaacacgtttatacagagtatgtaaaaatgttaatttatagtttaatcccatggcccacgcacacacgattaattttttttcatctccctttagattgttgtatagaaatttgggtactgtgaactccgccgtagtttccatgggactatataattttgtggcctcgaatacaaattttactacatagttatctatcttaaagactataccatatcctcctgtagatatgtgataaaaatcgtcgtttataggataaaatcgtttatccttttgttggaaaaaggatgaattaatgtaatcattctcttctatctttagtagtgtttccttattaaaattcttaaaataatttaacaatctaactgacggagcccaattttggtgtaaatctaattgggacattatattgttaaaatacaaacagtctcctaatataacagtatctgataatctatggggagacatccattgatattcaggggatgaatcattggcaacacccatttattgtacaaaaagccccaatttacaaacgaaagtccaggtttgatagagacaaacaattaactattttgtctctgtttttaacacctccacagtttttaatttctttagtaatgaaattattcacaatatcagtatcttctttatctaccagagattttactaacttgataaccttggctgtctcattcaatagggtagtaatatttgtatgtgtgatattgatatctttttgaattgtttcttttagaagtgattctttgatggtgccagcatacgaattacaataatgcagaaactcggttaacatgcaggaattatagtaagccaattccaattgttgcctgtgttgtattagagtgtcaatatgagcaatggtgtccttgcgtttctctgatagaatgcgagcagcgattttggcgttatcatttgacgatatttctggaatgacgaatcctgtttctactaactttttggtaggacaaagtgaaacaatcaagaagatagcttctcctcctatttgtggaagaaattgaactcctctagatgatctactgacgatagtatctccttgacagatattggaccgaattacagaagtacctggaatgtaaagccctgaaaccccctcattttttaagcagattgttgccgtaaatcctgcactatgcccaagatagagagctcctttggtgaatccatctctatgtttcagtttaaccaagaaacagtcagctggtctaaaatttccatctctatctaatacagcatctaacttgatgtcaggaactatgaccggtttaatgttatatgtaacattgagtaaatccttaagttcataatcatcactgtcatcagttatgtacgatccaaacaatgtttctaccggcatagtggatacgaagatgctatccatcagaatgtttccctgattagtattttctatatagctattcttctttaaacgattttccaaatcagtaactatgttcatttttttaggagtaggacgcctagccagtatggaagaggattttctagatcctctcttcaacatctttgatctcgatggaatgcaaaaccccatagtgaaacaaccaacgataaaaataatattgtttttcactttttataattttaccatctgactcatggattcattaatatctttataagagctactaacgtataattctttataactgaactgagatatatacaccggatctatggtttccataattgagtaaatgaatgctcggcaataactaatggcaaatgtatagaacaacgaaattatactagagttgttaaagttaatattttctatgagctgttccaataaattatttgttgtgactgcgttcaagtcataaatcatcttgatactatccagtaaaccgtttttaagttctggaatattatcatcccattgtaaagcccctaattcgactatcgaatatcctgctctgatagcagtttcaatatcgacggacgtcaatactgtaataaaggtggtagtattgtcatcatcgtgataaactacgggaatatggtcgttagtaggtacggtaactttacacaacgcgatatataactttccttttgtaccatttttaacgtagttgggacgtcctgcagggtattgttttgaagaaatgatatcgagaacagatttgatacgatatttgttggattcctgattattcactataatataatctagacagatagatgattcgataaatagagaaggtatatcgttggtaggataatacatccccattccagtattctcggatactctattgatgacactagttaagaacatgtcttctattctagaaaacgaaaacatcctacatggactcattaaaacttctaacgctcctgattgtgtctcgaatgcctcgtacaaggatttcaaggatgccatagattctttgaccaacgatttagaattgcgtttagcatctgatttttttattaaatcgaatggtcggctctctggtttgctaccccaatgataacaatagtcttgtaaagataaaccgcaagaaaatttatacgcatccatccaaataaccctagcaccatcggatgatattaatgtattattatagattttccatccacaattattgggccagtatactgttagcaacggtatatcgaatagattactcatgtaacctactagaatgatagttcgtgtactagtcataatatctttaatccaatctaaaaaatttaaaattagattttttacactgttaaagttaacaaaagtattacccgggtacgtggatatcatatatggcattggtccattatcagtaatagctccataaactgatacggcgatggtttttatatgtgtttgatctaacgaggaagaaattcgcgcccacaattcatctctagatatgtatttaatatcaaacggtaacacatcaatttcgggacgcgtatatgtttctaaatttttaatccaaatataatgatgacctatatgccctattatcatactgtcaactatagtacacctagggaacttacgatacatctgtttcctataatcgttaaattttacaaatctataacatgctaaaccttttgacgacagccattcattaatttctgatatggaatctgtattctcgataccgtatcgttctaaagccagtgctatatctccctgttcgtgggaacgctttcgtataatatcgatcaacggataatctgaagtttttggagaataatatgactcatgatctatttcgtccataaacaatctagacataggaattggaggcgatgatcttaattttgtgcaatgagtcgtcaatcctataacttctaatcttgtaatattcatcatcgacataatactatctatgttatcatcgtatattagtataccatgaccttcttcatttcgtgccaaaatgatatacagtcttaaatagttacgcaatatctcaatagtttcataattgttagctgttttcatcaaggtttgtatcctgtttaacatgatggcgttctataacgtctctattttctatttttaattttttaaatttttaacgatttactgtggctagatacccaatctctctcaaatatttttttagcctcgcttacaagctgtttatctatactattaaaactgacgaatccgtgattttggtaatgggttccgtcgaaatttgccgaagtgatatgaacatattcgtcgtcgactatcaacaattttgtattattctgaatagtgaaaaccttcacagatagatcattttgaacacacaacgcatctagacttttggcggttgccatagaatatacgtcgttcttatcccaattaccaactagaagtctgatcttaactcctctattaatggctgcttctataatggagttgtaaatgtcgggccaatagtagctattaccgtcgacacgtgtagtgggaactatggccaaatgttcaatatctatactagtcttagctgacctgagtttatcaataactacatcggtatctagatctctagaatatcccaataggtgttccggagaatcagtaaagaacactccacctataggattcttaatatgatacgcagtgctaactggcaaacaacaagccgcagagcataaattcaaccatgaattttttgcgctattaaaggctttaaaagtatcaaatcttctacgaagatctgtggccagcgggggataatcagaatatacacctaacgttttaatcgtatgtatagatcctccagtaaatgacgcgtttcctacataacatctttcatcatctgacacccaaaaacaaccgagtagtagtcccacattattttttttatctatattaacggttataaaatttatatccgggcagtgactttgtagctctcccagatttcttttccctcgttcatctagcaaaactattattttaatccctttttcagatgcctcttttagtttatcaaaaataagcgctcccctagtcgtactcagaggattacaacaaaaagatgctatgtatatatatttcttagctagagtgataatttcgttaaaacattcaaatgttgttaaatgatcggatctaaaatccatattttctggtagtgtttctaccagcctacattttgctcccgcaggtaccgatgcaaatggccacatttagttaacataaaaacttatacatcctgttctatcaacgattctagaatatcatcggctatatcgctaaaattttcatcaaagtcgacatcacaacctaactcagtcaatatattaagaagttccatgatgtcatcttcgtctatttctatatccgtatccattgtagattgttgaccgattatcgagtttaaatcattactaatactcaatccttcagaatacaatctgtgtttcattgtaaatttataggcggtgtatttaagttggtagattttcaattatgtattaatatagcaacagtagttcttgctcctccttgattctagcatcctcttcattattttcttctacgtacataaacatgtccaatacgttagacaacacaccgacgatggcggccgctacagacacgaatatgactaaaccgatgaccatttaaaaacccctctctagctttcacttaaactgtatcgatcattcttttagcacatgtataatataaaaacattattctatttcgaatttaggcttccaaaaatttttcatccgtaaaccgataataatatatatagacttgttaatagtcggaataaatagattaatgcttaaactatcatcatctccacgattagagatacaatatttacattctttttgctgtttcgaaactttatcaatacacgttaatacaaacccaggaaggagatattgaaactgaggctgttgaaaatgaaacggtgaatacaataattcagataatgtaaaatcatgattccgtattctgatgatattagaactgctaatggatgtcgatggtatgtatctaggagtatctattttaacaaagcatcgatttgctaatatacaattatccttttgattaattgttattttattcatattcttaaaaggtttcatatttatcaattcttctacattaaaaatttccatttttaatttatgtagccccgcaatactcctcattacgtttcattttttgtctataatatccattttgttcatctcggtacatagattatccaattgagaagcgcatttagtagttttgtacattttaagtttattgacgaatcgtcgaaaactagttatagttaacattttattatttgataccctgatattaatacccctgccgttactattatttataactgatgtaatccacgtaacattggaattaactatcgatagtaatgcatcgacgcttccaaaattgtctattataaactcaccgataatttttttattgcatgttttcatattcattaggattatcaaatctttaatcttattacgattgtatgcgttgatattacaagacgtcattctaaaagacggaggatctccatcaaatgccagacaatcacgtacaaagtacatggaaataggttttgttctattgcgcatcatagatttatatagaacacccgtagaaatactaatttgttttactctataaaatactaatgcatctatttcatcgttttgtataacgtctttccaagtgtcaaattccaaatttttttcattgatagtaccaaattcttctatctctttaactacttgcatagataggtaattacagtgatgcctacatgccgttttttgaaactgaatagatgcgtctagaagcgatgctacgctagtcacaatcaccactttcatatttagaatatatatatgtaaaaatatagtagaatttcattttgtttttttctatgctataaatgaattctcattttgcatctgctcatactccgttttatattaataccaaagaaggaagatatctggttctaaaagccgttaaagtatgcgatgttagaactgtagaatgcgaaggaagtaaagcttcctgcgtactcaaagtagataaaccctcatcgcccgcgtgtgagagaagaccttcgtccccgtccagatgcgagagaatgaataaccctggaaaacaagttccgtttatgaggacggacatgctacaaaatatgttcgcggctaatcgcgataatgtagcttctagacttttgtcctaaaatactattatatccttttcgatattaataaatccgtgtcgtccaggttttttatctctttcagtatgtgaatagataggtattttatctctattcatcatcgaatttaagagatccgataaacattgtttgtattctccagatgtcagcatctgatacaacaatatatgtgcacataaacctctggcacttatttcatgtaccttccccttatcactaaggagaatagtatttgagaaatatgtatacatgatattatcatgaattagatatacagaatttgtaacactctcgaaatcacacgatgtgtcggcgttaagatctaatatatcactcgataacacattttcatctagatacactagacattttttaaagctaaaatagtctttagtagtaacagtaactatgcgattattttcatcgatgatacatttcatcggcatattattacgcttaccatcaaagactataccatgtgtatatctaacgtattctagcatggttgccatacgcgcattaaacttttcaggatctttggatagatcttccaatctatctatttgagaaaacatttttatcatgttcaatagttgaaacgtcggatccactatatagatattatctataaagattttaggaactacgttcatggtatcctggcgaatattaaaactatcaatgatatgattatcgttttcatcttttatcaccatatagtttctaagatatgggattttacttaatataatattatttcccgtgataaattttattagaaaggccaaatctataagaaaagtcctagaattagtctgaagaatatctatatcgccgtatagtatatttggattaattagatatagagaatatgatccgtaacatatacaacttttattatggcgtctaagatattcttccatcaacttattaacatttttgactagggaagatacattatgacgtcccattacttttgccttgtctattactgcgacgttcatagaatttagcatatctcttgccaattcttccattgatgttacattataagaaattttagatgaaattacatttggagctttaatagtaagaactcctaatatgtccgtgtatgtggtcactaatacagattgtagttctataatcgtaaataatttacctatattatatgtttgagtctgtttagaaaagtagctaagtatacgatcttttatttctgatgcagatgtattaacatcggaaaaaaatctttttttattcttttttactaaagatacaaatatgtctttgttaaaaacagttattttctgaatatttctagcttgtaattttaacatatgatattcgttcacactaggtactctgcctaaataggtttctataatctttaatgtaatattaggaaaagtattctgatcaggattcctattcattttgaggatttaaaactctgattattgtctaatatggtctctacgcaaactttttcacagagcgatagagtttttgataactcgtttttcttaagaaatataaaactactgtctccagagctcgctctatcttttattttatctaattcgatacaaactcctgatactggttcagaaagtaattcattaattttcagtcctttatagaagatatttaatatagataatacaaaatcttcagtttttgatatcgatctgattgatcctagaactagatatattaataacgtgctcattaggcagtttatggcagcttgataattagatatagtatattccagttcatatttattagataccgcattgcccagattttgatattctatgaattcctctgaaaataaatccaaaataactagacattctattttttgtggattagtgtactctcttccctctatcatgttcactactggtgtccacgatgataaatatctagagggaatataatatagtccataggatgccaatctagcaatgtcgaataactgtaattttattcttcgctcttcattatgaattgattcttgaggtataaacctaacacaaattatattattagacttttcgtatgtaatgtctttcatgttataagtttttaatcctggaatagaatctattttaatgaggcttttaaacgcagagttctccaacgagtcaaagcataatactctgttgtttttcttatatacgatgttacgattttcttctttgaatggaataggtttttgaattagtttataattacaacataatagataaggaagtgtgcaaatagtacgcggaaaaaacataatagctcccctgttttcatccatggttttaagtaaatgatcactggcttctttagtcaatggatattcgaacattaaccgtttcatcatcattggacagaatccatatttcttaatgtaaagagtgatcaaatcattgtgtttattgtaccatcttgttgtaaatgtgtattcggttatcggatctgctcctttttctattaaagtatcgatgtcaatctcgtctaagaattcaactatatcgacatatttcatttgtatacacataaccattactaacgtagaatgtataggaagagatgtaacgggaacagggtttgttgattcgcaaactattctaatacataattcttctgttaatacgtcttgcacgtaatctattatagatgccaagatatctatataattattttgtaagatgatgttaactatgtgatctatataagtagtgtaataattcatgtattttgatatatgttccaactctgtctttgtgatgtctagtttcgtaatatctatagcatcctcaaaaaatatattcgcatatattcccaagtcttcagttctatcttctaaaaaatcttcaacgtatggaatataataatctattttacctcttctgatatcattaatgatatagtttttgacactatcttctgtcaattgattcttattcactatatctaagaaacggatagcgtccctaggacgaactactgccattaatatctctattatagcttctggacataattcatctattataccagaattaatgggaactattccgtatctatctaacatagttttaagaaagtcagaatctaagacttgatgttcatatattggttcatacatgaaatgatctctattgatgatagtgactatttcattctctgaaaattggtaactcattctatatatgctttccttgttgatgaaggatagaatatactcaatagaatttgtaccaacaaactgttctcttatgaatcgtatatcatcatctgaaataatcatgtaaggcatacatttaacaattagagacttgtctcctgttatcaatatactattcttgtgataatttatgtgtgaggcaaatttgtccacgttctttaattttgttatagtagatatcaaatccaatggagctacagttcttggcttaaacagatatagtttttctggaacaaattctacaacattattataaaggactttgggtaaataagtgggatgaaatcctattttaattaatgcgatagccttgtcctcgtgcagatatccaaacgcttttgtgatagtatggcattcattgtctagaaacgctctacgaatatctgtgacagatatcatctttagagaatatactagtcgcgttaatagtactacaatttgtattttttaatctatctcaataaaaaaattaatatgtatgattcaatgtataactaaactactaactgttattgataactagaatcagaatctaatgatgacgtacccaagaagtttatctactgccaatttagctgcattatttttagcatctcgtttagattttccatctgccttatcgaatactcttccgtcgatatctacacaggcataaaatgtaggagagttactaggcccaactgattcaatacgaaaagaccaatctctcttagttatttggcagtactcattaataacggtgacagggttagcatctttccaatcaataatttttttagccggaataacatcatcaaaagacttatgatcctctctcattgatttttcgcgggatacatcatctattatgacgtcagccataacatcagcatccggcttatccgcctccgttgtcataaaccaacgaggaggaatatcgtcggagctgtacaccatagcactacgttgaagatcgtacagagctttattaacttctcgcttctccatattaagttgtctagttagttgtgcagcagtagctccttcgattccaatggttttaatagcctcacacacaatctctgcgttagaacgttcgtcgatatagattttagacatttttagagagaactaacacaaccagcaataaaactgaacctactttatcatttttttattcatcatcctctggtggttcgtcgttcctatcaaatgtagctctgattaacccgtcatctataggtgatgctggttctggagattctggaggagatggattattatctggaagaatctctgttatttccttgttttcatgtatcgattgcgttgtaacattaagattgcgaaatgctctaaatttgggaggcttaaagtgttgtttgcaatctctacacgcgtgtctaactagtggaggttcgtcagctgctctagtttgaatcatcatcggcgtagtattcctacttttacagttaggacacggtgtattgtatttctcgtcgagaacgttaaaataatcgttgtaactcacatcctttattttatctatattgtattctactcctttcttaatgcattttataccgaataagagatagcgaaggaattctttttcggtgccgctagtacccttaatcatatcacatagtgttttatattccaaatttgtggcaatagacggtttatttctatacgatagtttgtttctggaatcctttgagtattctataccaatattattctttgattcgaatttagtttcttcgatattagattttgtattacctatattcttgatgtagtactttgatgatttttccatggcccattctattaagtcttccaagttggcatcatccacatattgtgatagtaattctcggatatcagtagcggctaccgccattgatgtttgttcattggatgagtaactactaatgtatacattttccatttataacacttatgtattaactttgttcatttatattttttcattattatgttgatattaacaaaagtgaatatatatatatgttaataattgtattgtggttatacggctacaattttataatgagtgaaagtcagtgtccgatgatcaatgacgatagctttactctgaaaagaaagtatcaaatcgatagtgcggagtcaacaataaaaatggataagaagaggataaagtttcagaatagagccaaaatggtaaaagaaataaatcagacaataagagcagcacaaactcattacgagacattgaaactaggatacataaaatttaagagaatgattaggactactactctagaagatatagcaccatctattccaaataatcagaaaacttataaactattctcggacatttcagccatcggcaaagcatcacagaatccgagtaagatggtatatgctctgctgctttacatgtttcccaatttgtttggagatgatcatagattcattcgttatagaatgcatccaatgagtaaaatcaaacacaagatcttctctcctttcaaacttaatcttattagaatattagtggaagaaagattctataataatgaatgcagatctaataaatggaaaataattggaacacaagttgataaaatgttgatagctgaatctgataaatatacaatagatgcaaggtataacctaaaacccatgtatagaatcaagggagaatctgaagaagataccctcttcatcaaacagatggtagaacaatgtgtgacatcccaggaattggtggaaaaagtgttgaagatactgtttagagatttgttcaagagtggagaatacaaagcgtacagatacgatgatgatgtagaaaatggatttattggattggatacactaaaattaaacattgttcatgatatagttgaaccatgtatgcctgttcgtaggccagtggctaagatactgtgtaaagaaatggtaaataaatactttgagaatccgctacatattattggtaagaatcttcaagagtgcattgactttgttagtgaataggcatttcatctttctccaatactaattcaaattgttaaattaataatggatagtataaatagtaaaaataattattagaataagagtgtagtatcatagataactctcttctataaaaatggattttattcgtagaaagtatcttatatacacagtagaaaataatatagattttttaaaggatgatacattaagtaaagtaaacaattttaccctcaatcatgtactagctctcaagtatctagttagcaattttcctcaacacgttattactaaggatgtattagctaataccaatttttttgttttcatacatatggtacgatgttgtaaagtgtacgaagcggttttacgacacgcatttgatgcacccacgttgtacgttaaagcattgactaagaattatttatcgtttagtaacgcaatacaatcgtacaaggaaaccgtgcataaactaacacaagatgaaaaatttttagaggttgccgaatacatggacgaattaggagaacttataggcgtaaattatgacttagttcttaatccattatttcacggaggggaacccatcaaagatatggaaatcatttttttaaaactgtttaagaaaacagacttcaaagttgttaaaaaattaagtgttataagattacttatttgggcatacctaagcaagaaagatacaggcatagagtttgcggataatgatagacaagatatatatactctatttcaacaaactggtagaatcgtccatagcaatctaacagaaacgtttagagattatatctttcccggagataagactagctattgggtgtggttaaacgaaagtatagctaatgatgcggatatcgttcttaatagacccgccattaccatgtatgataaaattcttagttatatatactctgagataaaacaaggacgcgttaataaaaacatgcttaagttagtttatatctttgagcctgaaaaagatatcagagaacttctgctagaaatcatatatgatattcctggagatatcctatctattattgatgcaaaaaacgacgattggaaaaaatattttattagtttttataaagctaattttattaacggtaatacatttattagtgatagaacgtttaacgaggacttattcagagttgttgttcaaatagatcccgaatatttcgataatgaacgaattatgtctttattctctacgagtgctgcggacattaaacgatttgatgagttagatattaataacagttatatatctaatataatttatgaggtgaacgatatcacattagatacaatggatgatatgaagaagtgtcaaatctttaacgaggatacgtcgtattatgttaaggaatacaatacatacctgtttttgcacgagtcggatcccatggtcatagagaacggaatactaaagaaactgtcatctataaaatccaagagtagacggctgaacttgtttagcaaaaacattttaaaatattatttagacggacaattggctcgtctaggtcttgtgttagatgattataaaggagacttgttagttaaaatgataaaccatcttaagtctgtggaggatgtatccgcattcgttcgattttctacagataaaaaccctagtattcttccatcgctaatcaaaactattttagctagttataatatttccatcatcgtcttatttcaaaggtttttgagagataatctatatcatgtagaagaattcttggataaaagcatccatctaaccaagacggataagaaatatatacttcaattgataagacacggtagatcatagaacagaccaaatatattattaataatttgtatatacatagatataattatcacacatttttgataaatgggaactgctgcaacaattcagactcccaccaaattaatgaataaagaaaatgcagaaatgattttggaaaaaattgttgatcatatagttatgtatattagtgacgaatcaagtgattcagaaaataatcctgaatatattgattttcgtaacagatacgaagactatagatctctcattataaaaagtgatcacgagtttgtaaagctatgtaaaaatcatgcggagaaaagttctccagaaacgcaacaaatgattatcaaacacatatacgaacaatatcttattccagtatctgaagtactattaaaacctataatgtccatgggtgacataattacatataacggatgtaaagacaatgaatggatgctagaacaactctctaccctaaactttaacaatctccgcacatggaactcatgtagcataggcaatgtaacgcgtctgttttatacattttttagttatctgatgaaagataaactaaatatataagtataatcccattctaatactttaacctgatgtattagcatcttattagaatattaacctaactaaaagacataacataaaaactcattacatagttgataaaaagcggtaggatataaatattatggctgccaccgttccgcgttttgacgacgtgtacaaaaatgcacaaagaagaattctagatcaagaaacattttttagtagaggtctaagtagaccgttaatgaaaaacacatatctatttgataattacgcgtatggatggataccagaaactgcaatttggagtagtagatacgcaaacttagatgcaagtgactattatcccatttcgttgggattacttaaaaagttcgagtttctcatgtctctatataaaggtcctattccagtatacgaagaaaaagtaaatactgaattcattgctaatggatctttctccggtagatacgtatcatatcttagaaagttttctgctcttccaacaaacgagtttattagttttttgttactgacttccattccaatctataatatcttgttctggtttaaaaatactcagtttgatattactaaacacacattattcagatacgtctatacagataatgccaaacacctggcgttggctaggtatatgtatcaaacaggagactataagcctttgtttagtcgtctcaaagagaattatatatttaccggtcccgttccaatatgtatcaaagatatagatcaccctaatcttagtagagcaagaagtccatccgattatgagacattagctaatattagtactatattgtactttaccaagtatgatccggtattaatgtttttattgttttacgtacctgggtattcaattactacaaaaattactccagccgtagaatatctaatggataaactgaatctaacaaagagcgacgtacaactgttgtaaattattttatgcttcgtaaaatgtaggttttgaaccaaacattctttcaaagaatgagatgcataaaactttattatccaatagattgactatttcggacgtcaatcgtttaaagtaaacttcgtaaaatattctttgatcactgccgagtttaaaacttctatcgataattgtttcatatgttttaatatttacaagttttttggtccatggtccattaggacaaatatatgcaaaataatatcgttctccaagttctatagtctctggattatttttattatattcagtaaccaaatacatattagggttatctgcggatttataatttgagtgatgcattcgactcaacataaataattctagaggagacgatctactatcaaattcggatcgtaaatctgtttctaaagaacggagaatatctatacatacctgattagaattcatccgtccttcagacaacatctcagacagtctggttttgtacatcttaatcatattcttatgaaacttggaaacatctcttctagtttcactagtacctttattaattctctcaggtacagattttgaattcgacgatgctgagtatttcatcgttgtatatttcttcttcgattgcataatcagattcttatataccgcctcaaactctattttaaaattattaaacaatactctattattaatcagtcgttctaactctttcgctatttctatagacttatctacatcttgactgtctatctctgtaaacacggagtcggtatctccatacacgctacgaaaacgaaatctgtaatctataggcaacgatgttttcacaatcggattaatatctctatcgtccatataaaatggattacttaatggattggcaaaccgtaacataccgttagataactctgctccatttagtaccgattctagatacaagatcattctacgtcctatggatgtgcaactcttagccgaagcgtatgagtatagagcactatttctaaatcccatcagaccatatactgagttggctactatcttgtacgtatattgcatggaatcatagatggccttttcagttgaactggtagcctgttttagcatctttttatatctggctctctctgccaaaaatgttcttaatagtctaggaatggttccttctatcgatctatcgaaaattgctatttcagagatgaggttcggtagtctaggttcacaatgaaccgtaatatatctaggaggtggatatttctgaagcaatagctgattatttatttcttcttccaatctattggtactaacaacgacaccgactaatgtttccggagatagatttccaaagatacacacattaggatacagactgttataatcaaagattaatacattattactaaacattttttgttttggagcaaataccttaccgccttcataaggaaacttttgttttgtttctgatctaactaagatagttttagtttccaacaatagctttaacagtggacccttgatgactgtactcgctctatattcgaataccatggattgaggaagcacatatgttgacgcacccgcgtctgtttttgtttctactccataatactcccacaaatactgacacaaacaagcatcatgaatacagtatctagccatatctaaagctatgtttagattataatccttatacatctgagctaaatcaacgtcatcctttccgaaagataatttatatgtatcattaggtaaagtaggacataatagtacgactttaaatccattttcccaaatatctttacgaattactttacatataatatcctcatcaacagtcacataattacctgtggttaaaacctttgcaaatgcagcggctttgcctttcgcgtctgtagtatcgtcaccgatgaacgtcatttctctaactcctctatttaatactttacccatgcaactgaacgcgttcttggatatagaatccaatttgtacgaatccaatttttcaaatttttgaatgaatgaatatagatcgaaaaatatagttccattattgttattaacgtgaaacgtagtattggccatgccgcctactcccttatgactagactgatttctctcataaatacagagatgtacagcttcctttttgtccggagatctaaagataattttctctcctgttaataactctagacgattagtaatatatctcagatcaaagttatgtccgttaaaggtaacgacgtagtcgaacgttagttccaacaattgtttagctattcgtaacaaaactatttcagaacatagaactagttctcgttcgtaatccatttccattagtgactgtatcctcaaacatcctctatcgacggcttcttgtatttcctgttccgttaacatctcttcattaatgagcgtaaacaataatcgtttaccacttaaatcgatataacagtaacttgtatgcgagattgggttaataaatacagaaggaaacttcttatcgaagtgacactctatatctagaaataagtacgatcttgggatatcgaatctaggtatttttttagcgaaacagttacgtggatcgtcacaatgataacatccattgttaatctttgtcaaatattgctcgtccaacgagtaacatccgtctggagatatcccgttagaaatataaaaccaactaatattgagaaattcatccatggtggcattttgtatgctgcgtttctttggctcttctatcaaccacatatctgcgacggagcattttctatctttaatatctagattataacttattgtctcgtcaatgtctatagttctcatctttcccaacggcctcgcattaaatggaggaggagacaatgactgatatatttcgtccgtcactacgtaataaaagtaatgaggaaatcgtataaatacggtctcaccatttcgacatctggatttcagatataaaaatctgttttcaccgtgactttcaaaccaattaatgcaccgaacatccatttatagaatttagaaatatattttcatttaaatgaatcccaaacattggggaagagccgtatggaccattatttttatagtactttcgcaagcgggtttagacggcaacatagaagcgtgtaaacgaaaactatatactatagttagcactcttccatgtcctgcatgtagacggcacgcgactatcgctatagaggacaataatgtcatgtctagcgatgatctgaattatatttattattttttcatcagattatttaacaatttggcatctgatcccaaatacgcgatcgatgtgacaaaggttaaccctttataaacttaacccattataaaacttatgattagtcacaactgaaataaccgcgtgattattttttggtataattctacacggcatggtttctgtgactatgaattcaacccccgttacattagtgaaatctttaacaaacagcaagggttcgtcaaagacataaaactcattgtttacaatcgaaatagaccccctatcacacttaaaataaaaaatatccttatcctttaccaccaaataaaattctgattggtcaatgtgaatgtattcacttaacagttccacaaatttatttattaactccgaggcacatacatcgtcggtattttttatggcaaactttactcttccagcatccgtttctaaaaaaatattaacgagttccatttatatcatccaatattattgaaatgacgttgatggacagatgatacaaataagaaggtacggtacctttgtccaccatctcctccaattcatgctctattttgtcattaactttaatgtatgaaaacagtacgccacatgcttccatgacagtgtgtaacactttggatacaaaatgtttgacattagtataattgttcaagactgtcaatctataatagatagtagctataatatattctatgatggtattgaagaagatgacaaccttggcatattgatcatttaacacagacatggtatcaacagatagcttgaatgaaagagaatcagtaattggaataagcgtcttctcgatagagtgtccgtataccaacatgtctgatattttgatgtattccattaaattatttagttttttctttttattctcgttaaacagcatttctgtcaacggaccccaacatcgttgaccgattaagttttgattgatttttccgtgtaaggcgtatctagtcagatcgtatagcctatccaataatccatcatctgtgcgtagatcacatcgtacactttttaattctctatagaagagcgacagacatctggagcaattacagacagcaatttctttattctctacagatgtaagatacttgaagacattcctatgatgatgcagaattttggataacacggtattgatggtatctgttaccataattcctttgatggctgatagtgtcagagcacaagatttccaatctttgacaatttttagcaccattatctttgttttgatatctatatcagacagcatggtgcgtctgacaacacagggattaagacggaaagatgaaatgattctctcaacatcttcaatagataccttgctattttttctggcattatctatatgtgcgagaatatcctctagagaatcagtatcctttttgatgatagtggatctcaatgacatgggacgtttaaaccttcttattctatcaccagattgcatggtgatttgtcttctttcttttatcataatgtaatctctaaattcatcggcaaattgtctatatctaaaatcataatatgagatgtttacctctacaaatatctgttcgtccaatgttagagtatttacatcagttttgtattccaaattaaacatggcaacggatttaattttatattcctctattaagtcctcgtcgataataacagaatgtagataatcatttaatccatcgtacatggttggaagatgcttgttgacaaaatctttaattgtcttgatgaaggtgggactatatctaacatcttgattaataaaatttataacattgtccataggatactttgtaactagttttatacacatctcttcatcggtaagtttagacagaatatcgtgaacaggtggtatattatattcatcagatatacgaagaacaatgtccaaatctatattgtttaatatattatatagatgtagcgtagctcctacaggaatatctttaactaagtcaatgatttcatcaaccgttagatctattttaaagttaatcatataggcattgatttttaaaaggtatgtagccttgactacattctcattaattaaccattccaagtcactgtgtgtaagaagattatattctatcataagcttgactacatttggtcccgataccattaaagaattcttatgatataaggaaacagcttttaggtactcatctactctacaagaattttggagagccttaacgatatcagtgacgtttattatttcaggaggaaaaaacctaacattgagaatatcggaattaatagcttccagatacagtgattttggcaatagtccgtgtaatccataatccagtaacacgagctggtgcttgctagacaccttttcaatgtttaatttttttgaaataagctttgataaagccttcctcgcaaattccggatacatgaacatgtcggcgacatgattaagtattgttttttcattattttctcaataccccaatagatgatagaatatcacccaatgcgtccatgttgtctatttccaacaggtcgctatatccaccaatagaagtttttccaaaaaagattctaggaacagttctaccaccagtaatttgttcaaaatagtcacgcaattcattttcgggtttaaattctttaatatcgacaatttcatacgctcctcttttgaaactaaacttatttagaatatccagtgcatttctacaaaaaggacatgtatacttgacaaaaattgtcactttgttattggccaacctttgttgtacaaattcctcggccattttaatatttaagtgatataaaactatctcgacttatttaactctttagtcgagatatatggacgcagatagctatatgatagccaactacagaaggcaaacgctataaaaaacataattacgacgagcatatttataaatatttttattcagcattacttgatatagtaatattaggcacagtcaaacattcaaccactctcgatacattaactctctcattttctttaacaaattctgcaatatcttcgtaaaaagattcttgaaactttttagaatatctatcgactctagatgaaatagcgttcgtcaacatactatgttttgtatacataaaggcgcccattttaacagtttctagtgacaaaatgctagcgatcctaggatcctttagaatcacatagattgacgattcgtctctcttagtaactctagtaaaataatcatacaatctagtacgcgaaataatattatccttgacttgaggagatctaaacaatctagttttgagaacatcgataagttcatcgggaatgacatacatactatctttaatagaactcttttcatccagttgaatggattcgtccttaaccaactgattaatgagatcttctattttatcattttccagatgatatgtatgtccattaaagttaaattgtgtagcgcttctttttagtctagcagccaatactttaacatcactaatatcgatatacaaaggagatgatttatctatggtattaagaattcgtttttcgacatccgtcaaaaccaattcctttttgcctgtatcatccagttttccatcctttgtaaagaaattattttctactagactattaataagactgataaggattcctccataattgcacaatccaaactttttcacaaaactagactttacaagatctacaggaatgcgtacttcaggttttttagcttgtgattttttcttttgcggacattttcttgtgaccaactcatctaccatttcattgattttagcagtgaaataagctttcaatgcacgggcactgatactattgaaaacgagttgatcttcaaattccgccatttaagttcaccaaacaacttttaaatacaaatatatcaatagtagtagaataagaactataaaaaaaataataattaaccaataccaaccccaacaaccggtattattagttgatgtgactgttttctcatcacttagaacagatttaacaatttctataaagtctgtcaaatcatcttccggagaccccataaatacaccaaatatagcggcgtacaacttatccatttatacattgaatattggcttttctttatcgctatcttcatcatattcatcatcaatatcaacaagtcccagattacgagccagatcttcttctacattttcagtcattgatacacgttcactatctccagagagtccgataacgttagccaccacttctctatcaatgattagtttcttgagcgcgaaagtaatttttgtttccgttccggatctatagaagacgataggtgtgataattgccttggccaattgtctttctcttttactgagtgattctagttcaccttctatagatctgagaatggatgattctccagtcgaaacatattctaccatggatccgtttaatttgttgatgaagatggattcatccttaaatgttttctctgtaatagtttccaccgaaagactatgcaaagaatttggaatgcgttccttgtgcttaatgtttccatagacggcttctagaagttgatacaacataggactagccgcggtaacttttatttttagaaagtatccatcgcttctatcttgtttagatttatttttataaagtttagtctctccttccaacataataaaagtggaagtcatttgactagataaactatcagtaagttttatagagatagacgaacaattagcgtattgagaagcatttagtgtaacgtattcgatacattttgcattagatttactaatcgattttgcatactctataacacccgcacaagtctgtagagaatcgctagatgcagtaggtcttggtgaagtttcaactctcttcttgattaccttactcatgattaaacctaaataattgtactttgtaatataatgatatatattttcactttatctcatttgagaataaaaatgtttttgtttaaccactgcatgatgtacagatttcggaatcgcaaaccaccagtggttttattttatccttgtccaatgtgaattgaatgggagcggatgcgggtttcgtacgtagatagtacattcccgtttttagaccgagactccatccgtaaaaatgcatactcgttagtttggaataactcggatctgctatatggatattcatagattgactttgatcgatgaaggctcccctgtctgcagccatttttatgatcgtcttttgtggaatttcccaaatagttttataaactcgcttaatatcttctggaaggtttgtattctgaatggatccaccatctgccataatcctattcttgatctcatcattccataattttctctcggttaaaactctaaggagatgcggattaactacttgaaattctccagacaatactctccgagtgtaaatattactggtatacggttccaccgactcattatttcccaaaatttgagcagttgatgcagtcggcataggtgccaccaataaactatttctaagaccgtatgttctgattttatcttttagaggttcccaattccaaagatccgacggtacaacattccaaagatcatattgtagaataccgttactggcgtacgatcctacatatgtatcgtatggtccttccttctcagctagttcacaactcgcctctaatgcaccgtaataaatggtttcgaagatcttcttatttagatcttgtgcttccaggctatcaaatggataatttaagagaataaacgcgtccgctaatccttgaacaccaataccgataggtctatgtctcttattagagatttcagcttctggaataggataataattaatatctataattttattgagatttctgacaattactttgaccacatccttcagtttgagaaaatcaaatcgcccatctattacaaacatgttcaaggcaacagatgccagattacaaacggctacctcattagcatccgcatattgtattatctcagtgcaaagattactacacttgatagttcctaaattttgttgattactctttttgttacacgcatccttataaagaatgaatggagtaccagtttcaatctgagattctataatcgctttccagacgactcgagcctttattatagatttgtatctcctttctctttcgtatagtgtatacaatcgttcgaactcgtctccccaaacattgtccaatccaggacattcatccggacacatcaacgaccactctccgtcatccttcactcgtttcataaagagatcaggaatccaaagagctataaatagatctctggttctatgttcctcgtttcctgtattctttttaagatcgaggaacgccataatatcagaatgccacggttccaagtatatggccataactccaggccgtttgtttcctccctgatctatgtatctagcggtgttattataaactctcaacattggaataataccgtttgatataccattggtaccggagatatagcttccactggcacgaatattactaattgatagacctattccccctgccattttagagattaatgcgcatcgttttaacgtgtcatagataccctctatgctatcatcgatcatgttaagtagaaaacagctagacatttggtgacgactagttcccgcattaaataaggtaggagaagcgtgcgtaaaccatttttcagaaagtagattgtacgtctcaatagctgagtctatatcccattgatgaattcctactgcgacacgcattaacatgtgctgaggtctttcaacgatcttgttgtttattttcaacaagtaggatttttccaaagttttaaaaccaaaatagttgtatgaaaagtctcgttcgtaaataataaccgagttgagtttatccttatatttgttaactatatccatggtgatacttgaaataatcggagaatgtttcccatttttaggattaacatagttgaataaatcctccatcacttcactaaatagtttttttgtttccttgtgtagatttgatacggctattctggcggctagaatggcataatccggatgttgtgtagtacaagtggctgctatttcggctgccagagtgtccaattctaccgttgttactccattatatattccttgaataaccttcatagctattttaataggatctatatgatccgtgtttaagccataacataattttctaatacgagacgtgattttatcaaacatgacattttccttgtatccatttcgtttaatgacaaacatttttgttggtgtaataaaaaaattatttaacttttcattaatagggatttgacgtatgtagcgtacaaaatgatcgttcctggtatatagataaagagtcctatatatttgaaaatcgttacggctcgattaaactttaatgattgcatagtgaatatatcattaggatttaactccttgactatcatggcggcgccagaaattaccatcaaaagcattaatacagttatgccgatcgcagttaaaacggttatagcatccaccatttatatctaaaaattagatcaaagaatatgtgacaaagtcctagttgtatactgagaattgacgaaacaatgtttcttacatatttttttcttattagtaactgacttaatagtaggaactggaaagctagacttgattattctataagtatagatacccttccagataatgttctctttgataaaagttccagaaaatgtagaattttttaaaaagttatcttttgctattaccaagattgtgtttagacgcttattattaatatgagtgatgaaatccacaccgcctctagatatcgcctttatttccacattagatggtaaatccaatagtgaaactatctttttaggaatgtatggactcgcgtttagaggagtgaacgtcttgggcgtcggaaaggatgattcgtcaaacgaataaacaatttcacaaatggatgttaatgtattagtaggaaattttttgacgctagtggaattgaagattctaatggatgatgttctacctatttcatccgataacatgttaatttccgacaccaacggttttaatatttcgatgatatacggtagtctctctttcggacttatatagcttattccacaatacgagtcattatatactccaaaaaacaaaataactagtataaaatctgtatcgaatgggaaaaacgaaattatcgacataggtatagaatccggaacattgaacgtattaatacttaattctttttctgtggtaagtaccgataggttattgacattgtatggttttaaatattctataacttgagacttgatagatattagtgatgaattgaaaattatttttatcaccacgtgtgtttcaggatcatcgtcgacgcccgtcaaccaaccgaatggagtaaaataaatatcattaatatatgctctagatattagtatttttattaatcctttgattatcatcttctcgtaggcgaatgattccatgatcaagagtgatttgagaacatcctccggagtattaatgggcttagtaaacagtccatcgttgcaataataaaagttatccaagttaaaggatattatgcattcgtttaaagatatcacctcatctgacggagacaattttttggtaggttttagagactttgaagctacttgtttaacaaagttattcatcgtcgtctactattctatttaattttgtagttaatttatcacatatcacattaattgactttttggtccatttttccatacgtttatattcttttaatcctgcgttatccgtttccgttatatccagggatagatcttgcaagttaaatagaatgctcttaaataatgtcattttcttatccgctaaaaatttaaagaatgtataaacctttttcagagatttgaaactcttaggtggtgtcctagtacacaatatcataaacaaactaataaacattccacattcagattccaacagctgattaacttccacattaatacagcctattttcgctccaaatgtacattcgaaaaatctgaataaaacatcgatgtcacaatttgtattatccaatacagaatgtttgtgattcgtgttaaaaccatcggagaaggaatagaaataaaaattattatagtggtggaattcagttggaatattgcctccggagtcataaaaggatactaaacattgttttttatcataaattacacatttccaatgagacaaataacaaaatccaaacattacaaatctagaggtagaacttttaattttgtctttaagtatatacgataagatatgtttattcataaacgcgtcaaatttttcatgaatcgctaaggagtttaagaatctcatgtcaaattgtcctatataatccacttcggatccataagcaaactgagagactaagttcttaatacttcgattgctcatccaggctcctctctcaggctctattttcatcttgacgacctttggattttcaccagtatgtattcctttacgtgataaatcatcgattttcaaatccatttgtgagaagtctatcgccttagatactttttcccgtagtcgaggtttaaaaaaatacgctaacggtatactagtaggtaactcaaagacatcatatatagaatggtaacgcgtctttaactcgtcggttaactctttcttttgatcgagttcgtcgctactattgggtctgctcaggtgccccgactctactagttccaacatcataccgataggaatacaagacactttgccagcggttgtagatttatcatatttctccactacatatccgttacaatttgttaaaaatttagatacatctatattgctacataatccagctagtgaatatatatgacataataaattggtaaatcctagttctggtattttactaattactaaatctgtatatctttccatttatcatggaaaagaatttaccagatatcttcttttttccaaactgcgttaatgtattctcttacaaatattcacaagatgaattcagtaatatgagtaaaacggaacgtgatagtttctcattggccgtgtttccagttataaaacatagatggcataacgcacacgttgtaaaacataaaggaatatacaaagttagtacagaagcacgtggaaaaaaagtatctcctccatcactaggaaaacccgcacacataaacctaaccgcgaagcaatatatatacagtgaacacacaataagctttgaatgttatagttttctaaaatgtataacaaatacagaaatcaattcgttcgatgagtatatattaagaggactattagaagctggtaatagtttacagatattttccaattccgtaggtaaacgaacagatactataggtgtactagggaataagtatccatttagcaaaattccattggcctcattaactcctaaagcacaacgagagatattttcagcgtggatttctcatagacctgtagttttaactggaggaactggagtgggtaagacgtcacaggtacccaagttattgctttggtttaattatttatttggtggattctctactctagataaaatcactgactttcacgaaagaccagtcattctatctcttcctaggatagctttagttagattgcatagcaataccattttaaaatcattgggatttaaggtactagatggatctcctatttctttacggtacggatctataccggaagaattaataaacaaacaaccaaaaaaatatggaattgtattttctacccataagttatctctaacaaaactatttagttatggcactcttattatagacgaagttcatgagcatgatcaaataggagatattattatagcagtagcgagaaagcatcatacgaaaatagattctatgtttttaatgactgccacgttagaggatgacagggaacggctaaaagtatttttacctaatcccgcatttatacatattcctggagatacactgtttaaaattagcgaggtatttattcataataagataaatccatcttccagaatggcatacatagaagaagaaaagagaaatttagttactgctatacagatgtatactcctcctgatggatcatccggtatagtctttgtggcatccgttgcacagtgtcacgaatataaatcatatttagaaaaaagattaccgtatgatatgtatattattcatggtaaggtcttagatatagacgaaatattagaaaaagtgtattcatcacctaatgtatcgataattatttctactccttatttggaatccagcgttactatacgcaatgttacacacatttatgatatgggtagagtttttgtccccgctccttttggaggatcgcaacaatttatttctaaatctatgagagatcaacgaaaaggaagagtaggaagagttaatcctggtacatacgtctatttctatgatctgtcttatatgaagtctatacagcgaatagattcagaatttctacataattatatattgtacgctaataagtttaatctaacactccccgaagatttgtttataatccctacaaatttggatattctatggcgtacaaaggaatatatagactcgttcgatattagtacagaaacatggaataaattattatccaattattatatgaagatgatagagtatgctaaactttatgtactaagtcctattctcgctgaggagttggataactttgagaggacgggagaattaactagtattgtacgagaagccattttatctctaaatttacaaattaagattttaaattttaaacataaagatgatgatacgtatatacacttttgtaaaatattattcggtgtctataacggaacaaacgctactatatattatcatagacctctaacgggatatatgaatatgatttcagatactatatttgttcctgtagataataactaaaaatcaaactctaatgaccacatctttttttagagatgaaaaattttccacatctccttttgtagacacgactaaacattttgcagaaaaaagtttattagtgtttagataatcgtatacttcatcagtgtagatagtaaatgtgaacagataaaaggtattcttgctcaatagattggtaaattccatagaatatattaatcctttcttcttgagatcccacatcatttcaaccagagacgttttatccaatgatttacctcgtactataccacatacaaaactagattttgcagtgacgtcgtacctggtattcctaccaaacaaaattttacttttagttcttttagaaaattctaaggtagaatctctatttgccaatatgtcatctatggaattaccactagcaaaaaatgatagaaatatatattgatacatcgcagctggttttgatctactatactttaaaaacgaatcagattccataattgcctgtatatcatcagctgaaaaactatgttttacacgtattccttcggcatttctttttaatgatatatcttgtttagacaatgataaagttatcatgtccatgagagacgcgtctccgtatcgtataaatatttcattagatgttagacgcttcattaggggtatacttctataaggtttcttaatcagtccatcattggttgcgtcaagaactactatcggatgttgttgggtatctctagtgttacacatggccttactaaagtttgggtaaataactatgatatctctattaattatagatgcatatatttcattcgtcaaggatattagtatcgacttgctatcgtcattaatacgtgtaatgtaatcatataaatcatgcgatagccaaggaaaatttaaatagatgttcatcatataatcgtcgctataattcatattaatacgttgacattgactaatttgtaatatagcctcgccacgaagaaagctctcgtattcagtttcatcgataaaggataccgttaaatataactggttgccgatagtctcatagtctattaagtggtaagtttcgtacaaatacagaatccctaaaatattatctaatgttggattaatctttaccataactgtataaaatggagacggagtcataactattttaccgtttgtacttactggaatagatgaaggaataatctccggacatgctggtaaagacccaaatgtctgtttgaagaaatccaatgttccaggtcctaatctcttaacaaaaattacgatattcgatcccgatatcctttgcattctatttaccagcatatcacgaactatattaagattatctatcatgtctattctcccaccgttatataaatcgcctccgctaagaaacgttagtatatccatacaatggaatacttcatttctaaaatagtattcgttttctaattctttaatgtgaaatcgtatactagaaagggaaaaattatctttgagttttccgttagaaaagaaccacgaaactaatgttctgattgcgtccgattccgttgctgaattaatggatttacaccaaaaactcatataacttctagatgtagaagcattcgctaaaaaattagtagaatcaaaggatataagtagatgttccaacaagtgagcaattcccaagatttcatctatatcattctcgaatccgaaattagaaattcccaagtagatatcctttttcatccgatcgttgatgaaaatacgaactttattcggtaagacaatcatttactaaggagtaaaataggaagtaatgttcgtatgtcgttatcatcgtataaattaaaggtgtgttttttaccattaagtgacattataattttaccaatattggaattataatataggtgtatttgcgcactcgcgacggttgatgcatcggtaaatatagctgtatctaatgttctagtcggtatttcatcatttcgctgtctaataatagcgttttctctatctgtttccattacagctgcctgaagtttattggtcggataatatgtaaaataataagaaatacatacgaataacaaaaataaaataagatataataaagatgccatttagagatctaattttgtttaacttgtccaaattcctacttacagaagatgaggaatcgttggagatagtgtcttccttatgtagaggatttgaaatatcttataatgacttgataacttactttccagataggaaataccataaatatatttataaagtatttgaacatgtagatttatcggaggaattaagtatggaattccatgatacaactctgagagatttagtctatcttagattgtacaagtattccaagtgtatacggccgtgttataaattaggagataatctaaaaggcatagttgttataaaggacaggaatatttatattagggaagcaaatgatgacttgatagaatatctcctcaaggaatacactcctcagatttatacatattctaatgagcgcgtccccataactggttcaaaattaattctttgtggattttctcaagttacatttatggcgtatacaacgtcgcatataacaacaaataaaaaggtagatgttctcgtttccaaaaaatgtatagatgaactagtcgatccaataaattatcaaatacttcaaaatttatttgataaaggaagcggaacaataaacaaaatactcaggaagatattttattcggtaacaggtggccaaactccataggtagctttttctatttcggattttagaatttccaaattcaccagcgatttatcggttttggtgaaatccaaggatttattaatgtccacaaatgccatttgttttgtctgtggattgtatttgaaaatggaaacgatgtagttagatagatgcgctgcgaagtttcctattagggttccgcgcttcacgtcacccagcatacttgaatcaccatcctttaaaaaaaatgataagatatcaacatggagtatatcatactcggattttaattcttctactgcatcactgacattttcacaaatactacaatacggtttaccgaaaataatcagtacgttcttcatttatgggtatcaaaaacttaaaatcgttactgctggaaaataaatcactgacgatattagatgataatttatacaaagtatacaatggaatatttgtggatacaatgagtatttatatagccgtcgccaattgtgtcagaaacttagaagagttaactacggtattcataaaatacgtaaacggatgggtaaaaaagggagggcatgtaaccctttttatcgatagaggaagtataaaaattaaacaagacgttagagacaagagacgtaaatattctaaattaaccaaggacagaaaaatgttagaattagaaaagtgtacatccgaaatacaaaatgttaccggatttatggaagaagaaataaaggcagaaatgcaattaaaaatcgataaactcacatttcaaatatatttatctgattctgataacataaaaatatcattgaatgagatactaacacatttcaacaataatgagaatgttacattattttattgtgatgaacgagacgcagaattcgttatgtgtctcgaggctaaaacacatttctctaccacaggagaatggccgttgataataagtaccgatcaggatactatgctatttgcatctgctgataatcatcctaagatgataaaaaacttaactcaactgtttaaatttgttccctcggcagaggataactatttagcaaaattaacggcgttagtgaatggatgtgatttctttcctggactctatggggcatctataacacccaccaacttaaacaaaatacaattgtttagtgattttacaatcgataatatagtcactagtttggcaattaaaaattattatagaaagactaactctaccgtagacgtgcgtaatattgttacgtttataaacgattacgctaatttagacgatgtctactcgtatattcctccttgtcaatgcactgttcaagaatttatattttccgcattagatgaaaaatggaatgaatttaaatcatcttatttagaaagcgtgccgttaccctgccaattaatgtacgcgttagaaccacgcaaggagattgatgtttcagaagttaaaactttatcatcttatatagatttcgaaaatactaaatcagatatcgatgttataaaatctatatcctcgatcttcggatattctaacgaaaactgtaacacgatagtattcggcatctataaggataatttactactgagtataaataattcattttactttaacgatagtctgttaataaccaatactaaaagtgataatataataaatataggttactagattaaaaatggtgttccaactcgtgtgctctacatgcggtaaagatatttctcacgaacgatataaattgattatacgaaaaaaatcattaaaggatgtactcgtcagtgtaaagaacgaatgttgtaggttaaaattatctacacaaatagaacctcaacgtaacttaacagtgcaacctctattggatataaactaatatggatccggttaattttatcaagacatatgcgcctagaggttctattatttttattaattataccatgtcattaacaagtcatttgaatccatcgatagaaaaacatgtgggtatttattatggtacgttattatcggaacacttggtagttgaatctacctatagaaaaggagttcgaatagtcccattggatagtttttttgaaggatatcttagtgcaaaagtatacatgttagagaatattcaagttatgaaaatagcagctgatacgtcattaactttattgggtattccgtatggatttggtcataatagaatgtattgttttaaattggtagctgactgttataaaaatgccggtattgatacatcgtctaaacgaatattgggcaaagatatttttctgagccaaaacttcacagacgataatagatggataaagatatatgattctaataatttaacattttggcaaattgattaccttaaagggtgagttaatatgcataactactcctccgttgttttttccctcgttctttttcttaacgttgtttgccatcactctcataatgtaaagatattctaaaatggtaaacttttgcatatcggacgcagaaattggtataaatgttgtaattgtattatttcccgtcaatggactagtcacagctccatcagttttatatcctttagagtatttctcactcgtgtctaacattctagagcattccatgatctgtttatcgttgatattggccggaaagatagattttttattttttattatattactattggcaattgtagatataacttctggtaaatatttttctaccttttcaatctcttctattttcaagccggctatatattctgctatattgttgctagtatcaataccttttctggctaagaagtcatatgtggtattcactatatcagttttaactggtagttccattagcctttccacttctgcagaataatcagaaattggttctttaccagaaaatccagctactataataggctcaccgatgatcattggcaaaatcctatattgtaccagattaatgagagcatatttcatttccaataattctgctagttcttgagacattgatttatttgatgaatctagttggttctctagatactctaccatttctgccgcatacaataacttgttagataaaatcagggttatcaaagtgtttagcgtggctagaatagtgggcttgcatgtattaaagaatgcggtagtatgagtaaaccgttttaacgaattatatagtctccagaaatctgtggcgttacatacatgagccgaatgacatcgaagattgtccaatatttttaatagctgctctttgtccattatttctatatttgactcgcaacaattgtagataccattaatcaccgattcctttttcgatgccggacaatagcacaattgtttagctttggactctatgtattcagaattaatagatatatctctcaatacagattgcactatacattttgaaactatgtcaaaaattgtagaacgacgctgttctgcagccatttaactttaaataatttacaaaaatttaaaatgagcatccgtataaaaatcgataaactgcgccaaattgtggcatatttttcagagttcagtgaagaagtatctataaatgtagactcgacggatgagttaatgtatatttttgccgccttgggcggatctgtaaacatttgggccattatacctctcagtgcatcagtgttttaccgaggagccgaaaatattgtgtttaatcttcctgtgtccaaggtaaaatcgtgtttgtgtagttttcacaatgatgccatcatagatatagaacctgatctggaaaataatctagtaaaactttctagttatcatgtagtaagtgtcgattgtaacaaggaactgatgcctattaggacagatactactatttgtctaagtatagatcaaaagaaatcttacgtgtttaattttcacaagtatgaagaaaaatgttgtggtagaaccgtcattcattaagtgacattataattttaccaatattggaattataatataggtgtatttgcgcacttgcgacggttgatgcatcggtaaatatagctgtatctaatgttctagtcggtatttcatcatttcgctgtctaataatagcgttttctctatctgtttccattacagctgcctgaagtttattggtcggataatatgtaaaataataagaaatacatacgaataacaaaaataaaataagatataataaagatgccatttagagatctaattttgtttaacttgtccaaattcctacttacagaagatgaggaatcgttggagatagtgtcttccttatgtagaggatttgaaatatcttataatgacttgataacttactttccagataggaaataccataaatatatttataaagtatttgaacatgtagatttatcggaggaattaagtatggaattccatgatacaactctgagagatttagtctatcttagattgtacaagtattccaagtgtatacggccgtgttataaattaggagataatctaaaaggcatagttgttataaaggacaggaatatttatattagggaagcaaatgatgacttgatagaatatctcctcaaggaatacactcctcagatttatacatattctaatgagcgcgtccccataactggttcaaaattaattctttgtggattttctcaagttacatttatggcgtatacaacgtcgcatataacaacaaataaaaaggtagatgttctcgtttccaaaaaatgtatagatgaactagtcgatccaataaattatcaaatacttcaaaatttatttgataaaggaagcggaacaataaacaaaatactcaggaagatattttattcggtaacaggtggccaaactccataggtagctttttctatttcggattttagaatttccaaattcaccagcgatttatcggttttggtgaaatccaaggatttattaatgtccacaaatgccatttgttttgtctgtggattgtatttgaaaatggaaacgatgtagttagatagatgcgctgcgaagtttcctattagggttccgcgcttcacgtcacccagcatacttgaatcaccatcctttaaaaaaaatgataagatatcaacatggagtatatcatactcggattttaattcttctactgcatcactgacattttcacaaatactacaatacggtttaccgaaaataatcagtacgttcttcatttatgggtatcaaaaacttaaaatcgttactgctggaaaataaatcactgacgatattagatgataatttatacaaagtatacaatggaatatttgtggatacaatgagtatttatatagccgtcgccaattgtgtcagaaacttagaagagttaactacggtattcataaaatacgtaaacggatgggtaaaaaagggagggcatgtaaccctttttatcgatagaggaagtataaaaattaaacaagacgttagagacaagagacgtaaatattctaaattaaccaaggacagaaaaatgctagaattagaaaagtgtacatccgaaatacaaaatgttaccggatttatggaagaagaaataaaggcagaaatgcaattaaaaatcgataaactcacatttcaaatatatttatctgattctgataacataaaaatatcattgaatgagatactaacacatttcaacaataatgagaatgttacattattttattgtgatgaacgagacgcagaattcgttatgtgtctcgaggctaaaacacatttctctaccacaggagaatggccgttgataataagtaccgatcaggatactatgctatttgcatctgctgataatcatcctaagatgataaaaaacttaactcaactgtttaaatatgttccatctgcagaggataactatttagcaaaattaacggcgttagtgaatggatgtgatttctttcctggactctatggggcatctataacacccaccaacttaaacaaaatacaattgtttagtgattttacaatcgataatatagtcactagtttggcaattaaaaattattatagaaagactaactctaccgtagacgtgcgtaatattgttacgtttataaacgattacgctaatttagacgatgtctactcgtatgttcctccttgtcaatgcactgttcaagaatttatattttccgcattagatgaaaaatggaatgaatttaaatcatcttatttagagaccgtgccgttaccctgtcaattaatgtacgcgttagaaccacgtaaggagattgatgtttcagaagttaaaactttatcatcttatatagatttcgaaaatactaaatcagatatcgatgttataaaatctatatcctcgatcttcggatattctaacgaaaactgtaacacgatagtattcggcatctataaggataatttactactgagtataaataattcattttactttaacgatagtctgttaataaccaatactaaaagtgataatataataaatataggttactagattaaaaatggtgttccaactcgtgtgctctacatgcggtaaagatatttctcacgaacgatataaattgattatacgaaaaaaatcattaaaggatgtactcgtcagtgtaaagaacgaatgttgtaggttaaaattatctacacaaatagaacctcaacgtaacttaacagtgcaacctctattggatataaactaatatggatccggttaattttatcaagacatatgcgcctagaggttctattatttttattaattataccatgtcattaacaagtcatttgaatccatcgatagaaaaacatgtgggtatttattatggtacgttattatcggaacacttggtagttgaatctacctatagaaaaggagttcgaatagtcccattggatagtttttttgaaggatatcttagtgcaaaagtatacatgttagagaatattcaagttatgaaaatagcagctgatacgtcattaactttattgggtattccgtatggatttggtcataatagaatgtattgttttaaattggtagctgactgttataaaaatgccggtattgatacatcgtctaaacgaatattgggcaaagatatttttctgagccaaaacttcacagacgataatagatggataaagatatatgattctaataatttaacattttggcaaattgattaccttaaagggtgagttaatatgcataactactcctccgttgttttttccctcgttctttttcttaacgttgtttgccatcactctcataatgtaaagatattctaaaatggtaaacttttgcatatcggacgcagaaattggtataaatgttgtaattgtattatttccatattattatgaagactcctggtaatactgatggcgttttccagggaatattctatgactgaatgttctcaagaactacaaaagttttctttcaaaatagctatctcgtctctcaacaaactacgaggattcaaaaagagagtcaatgtttttgaaactagaatcgtaatggataatgacgataacattttaggaatgttgttttcggatagagttcaatcctttaagatcaacatctttatggcgtttttagattaatactttcaatgagataaatatgggtggcggagtaagtgttgagctccctaaacgggatccgcacccgggagtacccactgatgagatgttattaaacgtggataaaatgcatgacgtgatagctcccgctaagcttttagaatatgtgcatataggaccactagcaaaagataaagaggataaagtaaagaaaagatatccagagtttagattagtcaacacaggacccggtggtctttcggcattgttaagacaatcgtataatggaaccgcacccaattgctgtcgcacttttaatcgtactcattattggaagaaggatggaaagatatcagataagtatgaagagggtgcagtattagaatcgtgttggccagacgttcacgacactggaaaatgcgatgttgatttattcgactggtgtcagggggatacgttcgatagaaacatatgccatcagtggatcggttcagcctttaataggagtaatagaactgtagagggtcaacaatcgttaataaatctgtataataagatgcaaacattatgtagtaaagatgctagtgtaccaatatgcgaatcatttttgcattatttacgcgcacacaatacagaagatagcaaagagatgatcgattatattctaagacaacagtctgcggactttaaacagaaatatatgagatgtagttatcccactagagataagttagaagagtcattaaaatatgcggaacctcgagaatgttgggatccagagtgttcgaatgccaatgttaatttcttactaacacgtaattataataatttaggactttgcaatattgtacgatgtaataccagcgtgaacaacttacagatggataaaacttcctcattaagattgtcatgtggattaagcaatagtgatagattttctactgttcccgtcaatagagcaaaagtagttcaacataatattaaacactcgttcgacctaaaattgcatttgatcagtttattatctctcttggtaatatggatactaattgtagctatttaaatgggtgccgcggcaagcatacagacgacggtgaatacactcagcgaacgtatctcgtctaaattagaacaagaagcgaacgctagtgctcaaacaaaatgtgatatagaaatcggaaatttttatatccgacaaaaccatggatgtaacctcactgttaaaaatatgtgctctgcggacgcggatgctcagttggatgctgtgttatcagccgctacagaaacatatagtggattaacaccggaacaaaaagcatacgtgccagctatgtttactgctgcgttaaacattcagacgagtgtaaacactgttgttagagattttgaaaattatgtgaaacagacttgtaattctagcgcggtcgtcgataacaaattaaagatacaaaacgtaatcatagatgaatgttacggagccccaggatctccaacaaatttggaatttattaatacaggatctagcaaaggaaattgtgccattaaagcgttgatgcaattgacgactaaggccactactcaaatagcacctagacaagttgctggtacaggagttcagttttatatgattgttatcggtgttataatattggcagcgttgtttatgtactatgccaagcgtatgttgttcacatccaccaatgataaaatcaaacttattttagccaataaggaaaacgtccattggactacttacatggacacattctttagaacttctccgatggttattgctaccacggatatgcaaaactgaaaatatattgataatattttaatagattaacatggaagttatcgctgatcgtctagacgatatagtgaaacaaaatatagcggatgaaaaatttgtagattttgttatacacggtctagagcatcaatgtcctgctatacttcgaccattaattaggttgtttattgatatactattatttgttatagtaatttatatttttacggtacgtctagtaagtagaaattatcaaatgttgttggtggtgctagtcatcacattaactattttttattactttatactataatagtactagactgacttctaacaaacatctcacctgccataaataaatgcttgatattaaagtcttctatttctaacactattccatctgtggaaaataatactctgacattatcgctaattgacacatcggtgagtgatatgcctataaagtaataatcttctttgggcacatataccagtgtaccaggttctaacaacctatttactggtgctcctgtagcatactttttctttaccttgagaatatccatcgtttgcttggtcaatagcgatatgtgattttttatcaaccactcaaaaaagtaattggagtgttcatatcctctacgggctattgtctcatggccgtgtatgaaatttaagtaacacgactgtggtagatttgttctatagagccgattgccgcaaatagatagaactaccaatatgtctgtacaaatgttaaacattaattgattaacagaaaaaacaatgttcgttctgggaatagaaaccagatcaaaacaaaattcgttagaatatatgccacgtttatacatggaatataaaataactacagtttgaaaaataacagtatcatttaaacatttaacttgcggggttaatctcacaactttactgtttttgaactgttcaaaatatagcatcgatccgtgagaaatacgtttagccgcctttaatagaggaaatcccaccgcctttctggatctcaccaacgacgatagttctgaccagcaactcatttcttcatcatccacctgttttaacatataataggcaggagatagatatccgtcattgcaatattccttctcgtaggcacacaatctaatattgataaaatctccattctcttctctgcatttattatcttgtctcggtggctgattaggctgtggtcttggtttaggccttggtctatcgttgttgaatctattttggtcattaaatctttcatttcttcctggtatatttctatcacctcgtttggttggatttttgtctatattatcgtttgtaacatcggtacgggtattcatttatcacaaaaaaaacttctctaaatgagtctactgctagaaaacctcatcgaagaagataccatattttttgcaggaagtatatctgagtatgatgatttacaaatggttattgccggcgcaaaatccaaatttccaagatctatgctttctatttttaatatagtacctagaacgatgtcaaaatatgagttggagttgattcataacgaaaatatcacaggagcaatgtttaccacaatgtataatataagaaacaatttgggtctaggagatgataaactaactattgaagccattgaaaactatttcttggatcctaacaatgaagttatgcctcttattattaataatacggatatgactgccgtcattcctaaaaaaagtggtaggagaaagaataagaacatggttatcttccgtcaaggatcatcacctatcttgtgcattttcgaaactcgtaaaaagattaatatttataaagaaaatatggaatccgcgtcgactgagtatacacctatcggagacaacaaggctttgatatctaaatatgcgggaattaatgtcctgaatgtgtattctccttccacatccataagattgaatgccatttacggattcaccaataaaaataaactagagaaacttagtactaataaggaactagaatcgtatagttctagccctcttcaagaacccattaggttaaatgattttctgggactattggaatgtgttaaaaagaatattcctctaacagatattccgacaaaggattgattactataaatggagaatgttcctaatgtatactttaatcctgtgtttatagagcccacgtttaaacattctttattaagtgtttataaacacagattaatagttttatttgaagtattcgttgtattcattctaatatatgtattttttagatctgaattaaatatgttcttcatgcctaaacgaaaaatacccgatcctattgatagattacgacgtgctaatctagcgtgtgaagacgataaattaatgatctatggattaccatggatgacaactcaaacatctgcgttatcaataaatagtaaaccgatagtgtataaagattgtgcaaagcttttgcgatcaataaatggatcacaaccagtatctcttaacgatgttcttcgcagatgatgattcattttttaagtatttggctagtcaagatgatgaatcttcattatctgatatattgcaaatcactcaatatctagactttctgttattattattgatccaatcaaaaaataaattagaagctgtgggtcattgttatgaatctctttcagaggaatacagacaattgacaaaattcacagactttcaagattttaaaaaactgtttaacaaggtccctattgttacagatggaagggtcaaacttaataaaggatatttgttcgactttgtgattagtttgatgcgattcaaaaaagaatcctctctagctaccaccgcaatagatcctgttagatacatagatcctcgtcgtgatatcgcattttctaacgtgatggatatattaaagtcgaataaagtgaacaataattaattctttattgtcatcatgaacggcggacatattcagttgataatcggccccatgttttcaggtaaaagtacagaattaattagacgagttagacgttatcaaatagctcaatataaatgcgtgactataaaatattctaacgataatagatacggaacgggactatggacgcatgataagaataattttgaagcattggaagcaactaaactatgtgatgtcttggaatcaattacagatttctccgtgataggtatcgatgaaggacagttctttccagacattgtttaattctgtgagcgtatggcaaacgaaggaaaaatagttatagtagccgcactcgatgggacatttcaacgtaaaccgtttaataatattttgaatcttattccattatctgaaatggtggtaaaactaactgctgtgtgtatgaaatgctttaaggaggcttccttttctaaacgattgggtgaggaaaccgagatagagataataggaggtaatgatatgtatcaatcggtgtgtagaaagtgttacgtcggctcataatattatattttttatctaaaaaactaaaaataaacattgattaaattttaatataatacttaaaaatggatgttgtgtcgttagataaaccgtttatgtattttgaggaaattgataatgagttagattacgaaccagaaagtgcaaatgaggtcgcaaaaaaactgccgtatcaaggacagttaaaactattactaggagaattattttttcttagtaagttacagcgacacggtatattagatggtgccaccgtagtgtatataggatcggctcctggtacacatatacgttatttgagagatcatttctataatttaggagtgatcatcaaatggatgctaattgacggccgccatcatgatcctattttaaatggattgcgtgatgtaactctagtgactcggttcgttgatgaggaatatctacgatccatcaaaaaacaactgcatccttctaagattattttaatttctgatgtaagatccaaacgaggaggaaatgaacctagtacggcggatttactaagtaattacgctctacaaaatgtcatgattagtattttaaaccccgtggcatctagtcttaaatggagatgcccgtttccagatcaatggatcaaggacttttatatcccacacggtaataaaatgttacaaccttttgctccttcatattcagctgaaatgagattattaagtatttataccggtgagaacatgagactgactcgagttaccaaattagacgctgtaaattatgaaaaaaagatgtactaccttaataagatcgtccgtaacaaagtagttgttaactttgattatcctaatcaggaatatgactattttcacatgtactttatgctgaggaccgtgtactgcaataaaacatttcctactactaaagcaaaggtactatttctacaacaatctatatttcgtttcttaaatattccaacaacatcaactgaaaaagttagtcatgaaccaatacaacgtaaaatatctagcaaaaattctatgtctaaaaacagaaatagcaagagatccgtacgcggtaataaatagaaacgtactactgagatatactaccgatatagagtataatgatttagttactttaataaccgttagacataaaattgattctatgaaaactgtgtttcaggtatttaacgaatcatccataaattatactccggttgatgatgattatggagaaccaatcattataacatcgtatcttcaaaaaggtcataacaagtttcctgtaaattttctatacatagatgtggtaatatctgacttatttcctagctttgttagactagatactacagaaactaatatagttaatagtgtactacaaacaggcgatggtaaaaagactcttcgtcttcccaaaatgttagagacggaaatagttgtcaagattctctatcgccctaatataccattaaaaattgttagatttttccgcaataacatggtaactggagtagagatagccgatagatctgttatttcagtcgctgattaatcaattagtagagatgagataagaacattataataatcaataatatatcttatatcttatatcttatatcttatatcttgtttagaaaaatgctaatattaaaatagctaacgctagtaatccaatcggaagccatttgatatctataatagggtatctaatttcctgatttaaatagcggacagctatattctcggtagctactcgtttggaatcacaaacattatttacatctaatttactatctgtaatggaaacgtttcccaatgaaatggtacaatccgatacattgcattttgttatatttttttttaaagaggctggtaacaacgcatcgcttcgtttacatggctcgtaccaacaataatagggtaatcttgtatctattcctatccgtactatgcttttatcaggataaatacatttacatcgtatatcgtctttgttagcatcacagaatgcataaatttgttcgtccgtcatgataaaaatttaaagtgtaaatataactattatttttatagttgtaataaaaagggaaatttgattgtatactttcggttctttaaaagaaactgacttgataaaaatggctgtaatctctaaggttacgtatagtctatatgatcaaaaagagattaatgctacagatattatcattagtcatgttaaaaatgacgacgatatcggtaccgttaaagatggtagactaggtgctatggatggggcattatgtaagacttgtgggaaaacggaattggaatgtttcggtcactggggtaaagtaagtatttataaaactcatatagttaagcctgaatttatttcagaaattattcgtttactgaatcatatatgtattcactgcggattattgcgttcacgagaaccgtattccgacgatattaacctaaaagagttatcgggacacgctcttaggagattaaaggataaaatattatccaagaaaaagtcatgttggaacagtgaatgtatgcaaccgtatcaaaaaattactttttcaaagaaaaaggtttgtttcgtcaacaagttggatgatattaacgttcctaattctctcatctatcaaaagttaatttctattcatgaaaagttttggccattattagaaattcatcaatatccagctaacttattttatacagactactttcccatccctccgttgattattagaccggctattagtttttggatagatagtatacccaaagagaccaatgaattaacttacttattaggtatgatcgttaagaattgtaacttgaatgctgatgaacaggttatccagaaggcggtaatagaatacgatgatattaaaattatttctaataacactaccagtatcaatttatcatatattacatccggcaaaaataatatgattagaagttatatcgtcgcccgacgaaaagatcagaccgctagatctgtaattggtcccagtacatctatcaccgttaatgaggtaggaatgcccgcatatattagaaatacacttacagaaaagatatttgttaatgcctttacagtggataaagttaaacaactattagcgtcaaaccaagttaaattttactttaataaacgattaaaccaattaacaagaatacgccaaggaaagtttattaaaaataaaatacatttattgcctggtgattgggtagaagtagctgttcaagaatatacaagtattatttttggaagacagccgtctctacatagatacaacgtcatcgcttcatctatcagagctaccgaaggagatactatcaaaatatctcccggaattgccaactctcaaaatgctgatttcgacggggatgaggaatggatgatattagaacaaaatcctaaagctgtaattgaacaaagtattcttatgtatccgacgacgttactcaaacacgatattcatggagcccccgtttatggatctattcaagatgaaatcgtagcagcgtattcattgtttaggatacaagatctttgtttagatgaagtattgaacatcttggggaaatatggaagagagttcgatcctaaaggtaaatgtaaattcagcggtaaagatatctatacttacttgataggtgaaaagattaattatccgggtctcttaaaggatggtgaaattattgcaaacgacgtagatagtaattttgttgtggctatgaggcatctgtcattggctggactcttatccgatcataagtcgaacgtggaaggtatcaactttattatcaagtcatcttatgtttttaagagatatctatctatttacggttttggggtgacattcaaagatctgagaccaaattcgacgttcactaataaattggaggccatcaacgtagaaaaaatagaacttatcaaagaagcatacgccaaatatctcaacgatgtaagagacgggaaaatagttccattatctaaagctttagaggcggactatgtggaatccatgttatccaacttgacaaatcttaatatccgagagatagaagaacatatgagacaaacgctgatagatgatccagataataacctcctgaaaatggccaaagcgggttataaagtaaatcccacagaactaatgtatattctaggtacgtatggacaacaaaggattgatggtgaaccagcagagactcgagtattgggtagagttttaccttactatcttccagactctaaggatccagaaggaagaggttatattcttaattctttaacaaaaggattaacgggttctcaatattacttttcgatgctggttgcaagatctcaatctactgatatcgtctgtgaaacatcacgtaccggaacactggctagaaaaatcattaaaaagatggaggatatggtggtcgacggatacggacaagtagttataggtaatacgctcatcaagtacgccgccaattataccaaaattctaggctcagtatgtaaacctgtagatcttatctatccagatgagtccatgacttggtatttggaaattagtgctctgtggaataaaataaaacagggattcgtttactctcagaaacagaaacttgcaaagaagacattggcgccgtttaatttcctagtattcgtcaaacccaccactgaggataatgctattaaggttaaggatctgtacgatatgattcataacgtcattgatgatgtgagagagaaatacttctttacggtatctaatatagattttatggagtatatattcttgacgcatcttaatccttctagaattagaattacaaaagaaacggctatcactatctttgaaaagttctatgaaaaactcaattatactctaggtggtggaactcctattggaattatttctgcacaggtattgtctgagaagtttacacaacaagccctgtccagttttcacactactgaaaaaagtggtgccgtcaaacaaaaacttggtttcaacgagtttaataacttgactaatttgagtaagaataagaccgaaattatcactctggtatccgatgatatctctaaacttcaatctgttaagattaatttcgaatttgtatgtttgggagaattaaatccaaacatcactcttcgaaaagaaacagataggtatgtagtagatataatagtcaatagattatacatcaagagagcagaaataaccgaattagtcgtcgaatatatgattgaacgattcatctcctttagcgtcattgtaaaggaatggggtatggagacattcattgaggacgaggataatattagatttactgtctacctaaatttcgttgaaccggaagaattgaatcttagtaagtttatgatggttcttccgggggcagccaacaagggaaagattagtaaattcaagattcctatctctgactatacgggatatgacgacttcaatcaaacaaaaaagctcaataagatgactgtagaactcatgaatctaaaagaattgggttctttcgatttggaaaacgtcaacgtgtatcctggagtatggaatacatacgatatcttcggtatcgaggccgctcgtgaatacttgtgcgaagccatgttaaacacctatggagaagggttcgattatctgtatcagccttgtgatcttctcgctagtttactatgtgctagttacgaaccagaatcagtgaataaattcaagttcggcgcagctagtactcttaagagagctacgttcggagacaataaagcattgttaaacgcggctcttcataaaaagtcagaacctattaacgataatagtagctgccacttttttagcaaggtccctaatataggaactggatattacaaatactttatcgacttgggtcttctcatgagaatggaaaggaaactatctgataagatatcttctcaaaagatcaaggaaatggaagaaacagaagacttttaattcttatcaataacatatttttctatgatctgtcttttaaacgatggattttccacaaatgcgcctctcaagtccctcatagaatgatacacgtataaaaaatatagcataggcaatgactccttatttttagacattagatatgccaaaatcatagccccgcttctatttactcccgcagcacaatgaaccaacacgggctcgtttcgttgatcacatttagataaaaaggcggttacgtcgtcaaaatatttactaatatcggtagttgtatcatctaccaacggtatatgaataatattaatattagagttaggtaatgtatatttatccatcgtcaaatttaaaacatatttgaacttaacttcagatgatggtgcatccatagcatttttataatttcccaaatacacattattggttacccttgtcattatagtgggagatttggctctgtgcatatctccagttgaacgtagtagtaagtatttatacaaacttttcttatccatttataacgtacaaatggataaaactactttatcggtaaacgcgtgtaatttagaatacgttagagaaaaggctatagtaggcgtacaagcagccaaaacatcaacacttatattctttgttattatattggcaattagtgcgctattactctggtttcagacgtctgataatccagtctttaatgaattaacgagatatatgcgaattaaaaatacggttaacgattggaaatcattaacggatagcaaaacaaaattagaaagtgatagaggtagacttctagccgctggtaaggatgatatattcgacttcaaatgtgtggatttcggcgcctattttatagctatgcgattggataagaaaacatatctgccgcaagctattaggcgaggtactggagacgcgtggatggttaaaaaggcggcaaaggtcgatccatctgctcaacaattttgtcagtatttgataaaacacaagtctaataatgttattacttgtggtaatgagatgttaaatgaattaggttatagcggttattttatgtcaccgcattggtgttccgattttagtaatatggaatagtgttagataaatgcggtaacgaatgttcctgtaaggaaccataacagcttagatttaacgttaaagatgagcataaacataataaacaaaattacaatcaaacttataacattaatatcaaacaatccaaaaaatgaaatcagtggagtagtaaacgcgtacataactcctggataacgtttagcagctgccgttcctattctagaccaaaaattcggtttcatgttttcgaaacggtattctgcaacaagtcgaggatcgtgttctacatatttggcggcattatccagtatctgcctattgatcttcatttcgttttcaattctggctatttcaaaataaaatcccgatgatagacctccagactttataatttcatctacgatgttcagcgccgtagtaactctaataatataggctgataagctaacatcataccctcctgtatatgtgaatatggcatgatttttgtccattacaagctcggttttaactttattgcctgtaataatttctctcatctgtaggatatctatttttttgtcatgcattgccttcaagacgggacgaagaaacgtaatatcctcaataacgttatcgttttctacaataactacatattctacctttttattttctaactcggtaaaaaaattagaatcccatagggctaaatgtctagcgatatttcttttcgtttcctctgtacacatagtgttacaaaaccctgaaaagaagtgagtatacttgtcatcatttctaatgtttcctccagtccactgtataaacgcataatccttgtaatgatctggatcatccttgactaccacaacatttcttttttctggcataacttcgttgtcctttacatcatcgaacttctgatcattaatatgctcatgaacattaggaaatgtttctgatggaggtctatcaataactggcacaacaataacaggagttttcaccgccgccatttagttattgaaattaatcatatacaactctttaatacgagttatattttcgtctatccattgtttcacattgacatatttcgacaaaaagatataaaatgcgtattccaatgcttctctgtttaatgaattactaaaatatacaaacacgtcactgtctggcaataaatgatatcttagaatattgtaacaatgtaaggaaccataacagtttagatttaacgttaaagatgagcataaacataataaacaaaattacaatcaaacctataacattaatatcaaacaatccaaaaaatgaaatcagtggagtagtaaacgcgtacataactcctggataacgtttagcagctgccgttcctattctagaccaaaaatttggtttcatgttttcgaaacggtattctgcaacaagtcggggatcgtgttctacatatttggcggcattatccagtatctgcctattgatcttcatttcgttttcgattctggctatttcaaaataaaatcccgatgatagacctccagactttataatttcatctacgatgttcagcgccgtagtaactctaataatataggctgataagctaacatcataccctcctgtatatgtgaatatggcatgatttttgtccattacaagctcggttttaactttattgcctgtaataatttctctcatctgtaggatatctatttttttgtcatgcattgccttcaagacgggacgaagaaacgtaatatcctcaataacgttatcgttttctacaataactacatattctacctttttattttctaactcggtaaaaaaattagaatcccatagggctaaatgtctagcgatatttcttttcgtttcctctgtacacatagtgttacaaaaccctgaaaagaagtgagtatacttgtcatcatttctaatgtttcctccagtccactgtataaacgcataatccttgtaatgatctggatcatccttgactaccacaacatttcttttttctggcataacttcgttgtcctttacatcatcgaacttctgatcattaatatgctcatgaacattaggaaatgtttctgatggaggtctatcaataactggcacaacaataacaggagttttcaccgccgccatttagttattgaaattaatcatatacaactctttaatacgagttatattttcgtctatccattgtttcacatttacatatttcgacaaaaagatataaaatgcgtattccaatgcttctctgtttaatgaattactaaaatatacaaacacgtcactgtctggcaataaatgatatcttagaatattgtaacaatttattttgtattgcacatgttcgtgatctatgagttcttcttcgaatggcataggatctccgaatctgaaaacgtataaataggagttagaataataatatttgagagtattggtaatatataaactctttagcggtataattagtttttttctctcaatttctatttttagatgtgatggaaaaatgactaattttgtagcattagtatcatgaactctaatcaaaatcttaatatcttcgtcacacgttagctctttgaagtttttaagagatgcatcagttggttctacagatggagtaggtgcaacaattttttgttctacacatgtatgtactggagccattgttttaactataatggtgcttgtatcgaaaaactttaatgcagatagcggaagctcttcgccgcgactttctacgtcgtaattgggttctaacgccgatctctgaatggatactagttttctaagttctaatgtgattctctgaaaatgtaaatccaattcctccggcattatagatgtgtatacatcggtaaataaaactatagtatccaacgatcccttctcgcaaattctagtcttaaccaaaaaatcgtatataaccacggagatggcgtatttaagagtggattcttctaccgttttgttcttggatgtcatataggaaactataaagtccgcactactgttaagaatgattactaacgcaactatatagtttaaattaagcattttggaaacataaaataactctgtagacgatacttgactttcgaataagtttgcagacaaacgaagaaagaacagacctctcttaatttcagaagaaaactttttttcgtattcctgacgtctagagtttatatcaataagaaagttaagaattagtcggttaatgttgtatttcattacccaagtttgagatttcataatattatcaaaagacatgataatattaaagataaagcgctgactatgaacgaaatagctatatggttcgctcaagaatatagtcttgttaaacgtggaaacgataactgtatttttaatcacgtcagcggcatctaaattaaatataggtatatttattccacacactctacaatatgccacaccatcttcataataaataaattcgttagcaaaattattaattttagtgaaatagttagcgtcaactttcatagcttccttcaatctaatttgatgctcacacggtgcgaattccactctaacatcccttttccatgcctcaggttcatcgatctctataatatctagttttttgcgtttcacaaacacaggctcgtctctcgcgatgagatctgtatagtaactatgtaaatgataactagatagaaagatgtagctatatagatgacgatcctttaagagaggtataataactttaccccaatcagatagactgttgttatggtcttcggaaaaagaatttttataaatttttccagtattttccaaatatacgtacttaacatctaaaaaatccttaatgataataggaatggataatccgtctattttataaagaaatacatatcgcacattatacttttttttggaaatgggaataccgatgtgtctacataaatatgcaaagtctaaatattttttagagaatcttagttggtccaaattcttttccaagtacggtaatagatttttcatattgaacggtatcttcttaatctctggttctagttccgcattaaatgatgaaactaagtcactatttttataactaacgattacatcacctctaacatcatcatttaccagaatactgatcttcttttgtcgtaaatacatgtctaatgtgttaaaaaaaagatcatacaagttatacgtcatttcatctgtggtattcttgtcattgaaggataaactcgtactaatctcttctttaacagcctgttcaaatttatatcctatatacgaaaaaatagcaaccagtgtttgatcatccgcgtcaatattctgttctatcgtagtgtataacaatcgtatatcttcttctgtgatagtcgatacgttataaaggttgataacgaaaatatttttatttcgtgaaataaagtcatcgtaggattttggacttatattcgcgtctagtagatatgcttttatttttggaatgatctcaattagaatagtctctttagagtccatttaaagttacaaacaactaggaaattggtttatgatgtataatttttttagtttttatagattctttattctatacttaaaaaatgaaaataaatacaaaggttcttgagggttgtgttaaattgaaagcgagaaataatcataaattatttcattatcgcgatatccgttaagtttgtatcgtaatggcgtggtcaattacgaataaagcggatactagtagcttcacaaagatggctgaaatcagagctcatctaaaaaatagcgctgaaaataaagataaaaacgaggatattttcccggaagatgtaataattccatctactaagcccaaaaccaaacgagccactactcctcgtaaaccagcggctactaaaagatcaaccaaaaaggaggaagtggaagaagaagtagttatagaggaatatcatcaaacaactgaaaaaaattctccatctcctggagtcagcgacattgtagaaagcgtggccgctgtagagctcgatgatagcgacggggatgatgaacctatggtacaagttgaagctggtaaagtaaatcatagtgctagaagcgatctctctgacctaaaggtggctaccgacaatatcgttaaagatcttaagaaaattattactagaatctctgcagtatcgacggttctagaggatgttcaagcagctggtatctctagacaatttacttctatgactaaagctattacaacactatctgatctagtcaccgagggaaaatctaaagttgttcgtaaaaaagttaaaacttgtaagaagtaaatgcgtgcacttttttataaagatggtaaactctttaccgataataattttttaaatcctgtatcagacgataatccagcgtatgaggttttgcaacatgttaaaattcctactcatttaacagatgtagtagtatatgaacaaacgtgggaggaggcgttaactagattaatttttgtgggaagcgattcaaaaggacgtagacaatacttttacggaaaaatgcatgtacagaatcgcaacgctaaaagagatcgtatttttgttagagtatataacgttatgaaacgaattaattgttttataaacaaaaatataaagaaatcgtccacagattccaattatcagttggcggtttttatgttaatggaaactatgttttttattagatttggtaaaatgaaatatcttaaggagaatgaaacagtagggttattaacactaaaaaataaacacatagaaataagtcccgatgaaatagttatcaagtttgtaggaaaggacaaagtttcacatgaatttgttgttcataagtctaatagactatataaaccgctattgaaactgacggatgattctagtcccgaagaatttctgttcaacaaactaagtgaacgaaaggtatacgaatgtatcaaacagtttggtattagaatcaaggatctccgaacgtatggagtcaattatacgtttttatataatttttggacaaatgtaaagtccatatctcctcttccgtcaccaaaaaagttaatagcgttaactatcaaacaaactgctgaagtggtaggtcatactccatcaatttcaaaaagagcttatatggcaacgactattttagaaatggtaaaggataaaaattttttagatgtagtatctaaaactacgttcgatgaattcctatctatagtcgtagatcacgttaaatcatctacggatggatgatatagatctttacacaaataattacaagaccgataaatggaaatggataagcgtatgaaatctctcgcaatgacagctttcttcggagagctaagcacattagatattatggcattgataatgtctatatttaaacgccatccaaacaataccattttttcagtggataaggatggtcagtttatgattgatttcgaatacgataattataaggcttctcaatatttggatctgaccctcactccgatatctggagatgaatgcaagactcacgcatcgagtatagccgaacaattggcgtgtgtggatattattaaagaggatattagcgaatatatcaaaactactccccgtcttaaacgatttataaaaaaataccgcaatagatcagatactcgcatcagtcgagatacagaaaagcttaaaatagctctagctaaaggcatagattacgaatatataaaagacgcttgttaataagtaaatgaaaaaaaactagtcgtttataataaaacacgatatggatgccaacgtagtatcatcttctactattgcgacgtatatagacgctttagcgaagaatgcttcagaattagaacagaggtctaccgcatacgaaataaataatgaattggaactagtatttattaagccgccattgattactttgacaaatgtagtgaatatctctacgattcaggaatcgtttattcgatttaccgttactaataaggaaggtgttaaaattagaactaagattccattatctaaggtacatggtctagatgtaaaaaatgtacagttagtagatgctatagataacatagtttgggaaaagaaatcattagtgacggaaaatcgtcttcacaaagaatgcttgttgagactatcgacagaggaacgtcatatatttttggattacaagaaatatggatcctctatccgactagaattagtcaatcttattcaagcaaaaacaaaaaactttacgatagactttaagctaaaatattttctaggatccggtgcccaatctaaaagttctttgttgcacgctattaatcatccaaagtcaaggcctaatacatctctggaaatagaattcacacctagagacaatgaaacagttccatatgatgaactaataaaggaattgacgactctctcgcgtcatatatttatggcttctccagagaatgtaattctttctccgcctattaacgcgcctataaaaacctttatgttgcctaaacaagatatagtaggtttggatctggaaaatctatatgccgtaactaagactgacggcattcctataactatcagagttacatcaaacgggttgtattgttattttacacatcttggttatattattagatatcctgttaagagaataatagattccgaagtagtagtctttggtgaggcagttaaggataagaactggaccgtatatctcattaagctaatagagcccgtgaatgctatcagtgatagactagaagaaagtaagtatgttgaatctaaactagtggatatttgtgatcggatagtattcaagtcaaagaaatacgaaggtccgtttactacaactagtgaagtcgtcgatatgttatctacatatttaccaaagcaaccagaaggtgttattctgttctattcaaagggacctaaatctaacattgattttaaaattaaaaaggaaaatactatagaccaaactgcaaatgtagtatttaggtacatgtccagtgaaccaattatctttggagaatcgtctatctttgtagagtataagaaatttagcaacgataaaggctttcctaaagaatatggttctggtaagattgtgttatataacggcgttaattatctaaataatatctattgtttggaatatattaatacacataatgaagtgggtattaagtccgtggttgtacctattaagtttatagcagaattcttagttaatggagaaatacttaaacctagaattgataaaaccatgaaatatattaactcagaagattattatggaaatcaacataatatcatagtcgaacatttaagagatcaaagcatcaaaataggagatatctttaacgaggataaactatcggatgtgggacatcaatacgccaataatgataaatttagattaaatccagaagttagttattttacgaataaacgaactagaggaccgttgggaattttatcaaactacgtcaagactcttcttatttctatgtattgttccaaaacatttttagacgattccaacaaacgaaaggtattggcgattgattttggaaacggtgctgacctggaaaaatacttttatggagagattgcgttattggtagcgacggatccggatgctgatgctatagctagaggaaatgaaagatacaacaaattaaactctggaattaaaaccaagtactacaaatttgactacattcaggaaactattcgatccgatacatttgtctctagtgtcagagaagtattctattttggaaagtttaatatcatcgactggcagtttgctatccattattcttttcatccgagacattatgctaccgtcatgaataacttatccgaactaactgcttctggaggcaaggtattaatcactaccatggacggagacaaattatcaaaattaacagataaaaagacttttataattcataagaatttacctagtagcgaaaactatatgtctgtagaaaaaatagctgatgatagaatagtggtatataatccatcaacaatgtctactccaatgactgaatacattatcaaaaagaacgatatagtcagagtgtttaacgaatacggatttgttcttgtagataacgttgatttcgctacaattatagaacgaagtaaaaagtttattaatggcgcatctacaatggaagatagaccgtctacaaaaaactttttcgaactaaatagaggagccattaaatgtgaaggtttagatgtcgaagacttacttagttactatgttgtttatgtcttttctaagcggtaaataataatatggtatgggttctgatatccccgttctaaatgcattaaataattccaatagagcgatttttgttcctataggaccttccaactgtggatactctgtattgttaatagatatattaatacttttgtcgggtaacagaggttctacgtcttctaaaaataaaagttttataacatctggcctgttcataaataaaaacttggcgattctatatatactcttattatcaaatctagccattgtcttatagatgtgagctactgtaggtgtaccatttgattttctttctaatactatatatttctctcgaagaagttcttgcacatcatctgggaataaaatactactgttgagtaaatcagttattttttttatatcgatattgatggacatttttatagttaaggataataagtatcccaaagtcgataacgacgataacgaagtatttatacttttaggaaatcacaatgactttatcagattaaaattaacaaaattaaaggagcatgtatttttttctgaatatattgtgactccagatacatatggatctttatgcgtcgaattaaatgggtctagttttcagcacggtggtagatatatagaggtggaggaatttatagatgctggaagacaagttagatggtgttctacatccaatcatatatctaaagatatacccgaagatatgcacactgataaatttgtcatttatgatatatacacttttgacgctttcaagaataaacgattggtattcgtacaggtacctccgtcgttaggagatgatagtcatttgactaatccgttattgtctccgtattatcgtaattcagtagccagacaaatggtcaataatatgatttttaatcaagattcatttttaaaatatttattagaacatctgattagaagccactatagagtttctaaacatataacaatagttagatacaaggataccgaagaattaaatctaacgagaatatgttataatagagataagtttaaggcgtttgtattcgcttggtttaacggcgtttcggaaaatgaaaaggtactagatacgtataaaaaggtatctaatttgatataatgaattcagtgactgtatcacacgcgccatatactattacttatcacgatgattgggaaccagtaatgagtcaattggtagagttttataacgaagtagccagttggctgctacgagacgagacgtcgcctattcctgataagttctttatacagttgaaacaaccgcttagaaataaacgagtatgtgtgtgcggtatagatccgtatccgaaagatggaactggtgtaccgttcgaatcaccaaattttacaaaaaaatcaattaaggagatagcttcatctatatctagattaaccggagtaattgattataaaggttataaccttaatataatagacggggttataccctggaattattacttaagttgtaaattaggagaaacaaaaagtcacgcgatctactgggataagatttccaagttactgctgcagcatataactaaacacgttagtgttctttattgtttgggtaaaacagatttctcgaatatacgggcaaagttagaatccccggtaactaccatagtcggatatcatccagcggctagagaccgccaattcgagaaagatagatcatttgaaattatcaacgttttactggaattagacaacaaggcacctataaattgggctcaagggtttatttattaatgctttagtgaaattttaacttgtgttctaaatggatgcggctattagaggtaatgatgttatctttgttcttaagactataggtgtcccgtcagcgtgcagacaaaatgaagatccaagatttgtagaagcatttaaatgcgacgagttagaaagatatattgagaataatccagaatgtacactattcgaaagtcttagggatgaggaagcatactctatagtcagaattttcatggatgtagatttagacgcgtgtctagacgaaatagattatttaacggctattcaagattttattatcgaggtgtcaaactgtgtagctagattcgcgtttacagaatgcggtgccattcatgaaaatgtaataaaatccatgagatctaatttttcattgactaagtctacaaatagagataaaacaagttttcatattatctttttagacacgtataccactatggatacattgatagctatgaaacgaacactattagaattaagtagatcatctgaaaatccactaacaagatcgatagacactgccgtatataggagaaaaacaactcttcgggttgtaggtactaggaaaaatccaaattgcgacactattcatgtaatgcaaccaccgcatgataatatagaagattacctattcacttacgtggatatgaacaacaatagttattacttttctctacaacaacgattggaggatttagttcctgataagttatgggaaccagggtttatttcattcgaagacgctataaaaagagtttcaaaaatattcattaattctataataaactttaatgatctcgatgaaaataattttacaacggtaccactggtcatagattacgtaacaccttgtgcattatgtaaaaaacgatcgcataaacatccgcatcaactatcgttggaaaatggtgctattagaatttacaaaactggtaatccacatagttgtaaagttaaaattgttccgttggatggtaataaactgtttaatattgcacaaagaattttagacactaactctgttttattaaccgaacgaggagaccatatagtttggattaataattcatggaaatttaacagcgaagaacccttgataacaaaactaattttgtcaataagacatcaactacctaaggaatattcaagcgaattactctgtccgaggaaacgaaagactgtagaagctaacatacgagacatgttagtagattcagtggagaccgatacctatccggataaacttccgtttaaaaatggtgtattggacctggtagacggaatgttttactctggagatgatgctaaaaaatatacgtgtactgtatcaaccggatttaaatttgacgatacaaagttcgtcgaagacagtccagaaatggaagagttaatgaatatcattaacgatatccaaccattaacggatgaaaataagaaaaatagagagctatatgaaaaaacattatctagttgtttatgcggtgctaccaaaggatgtttaacattcttttttggagaaactgcaactggaaagtcgacaaccaaacgtttgttaaagtctgctatcggtgacctgtttgttgagacgggtcaaacaattttaacagatgtattggataaaggacctaatccatttatcgctaacatgcatttgaaaagatctgtattctgtagcgaactacctgattttgcatgtagtgggtcaaagaaaatcagatctgataatattaaaaagttgacagaaccttgtgtcattggaagaccgtgtttctccaataaaattaataatagaaaccatgcgacaatcattatcgatactaattacaaacctgtttttgataggatagataacgcattaatgagaagaattgccgtcgtgcgattcagaacacacttttctcaaccttctggtagagaggctgctgaaaataatgacgcgtacgataaagtcaaactattagacgaggggttagatggtaaaatacaaaataatagatatagattcgcatttctatacttgttggtgaaatggtacagaaaatatcatgttcctattatgaaactatatcctacacccgaagagattcctgactttgcattctatctcaaaataggtactctgttggtatctagctctgtaaagcatattccattaatgacggacctctccaaaaagggatatatattgtacgataatgtggtcactcttccgttgactactttccaacagaaaatatccaagtattttaattctagactatttggacacgatatagagagcttcatcaatagacataagaaatttgccaatgttagtgatgaatatctgcaatatatattcatagaggatatttcatctccgtaaatatatgctcatatatttatagaagatatcacatatctaaatgaataccggaatcatagatttatttgataatcatgttgatagtataccaactatattacctcatcagttagctactctagattatctagttagaactatcatagatgagaacagaagcgtgttattgttccatattatgggatcaggtaaaacaataatcgctttgttgttcgccttggtagcttccagatttaaaaaggtttacattctagtgccgaacatcaacatcttaaaaattttcaattataatatgggtgtagctatgaacttgtttaatgacgaattcatagctgagaatatctttattcattccacaacaagtttttattctcttaattataacgataacgtcattaattataacggattatctcgctacaataactctatttttatcgttgatgaggcacataatatctttgggaataatactggagaacttatgaccgtgataaaaaataaaaacaagattccttttttactattgtctggatctcccattactaacacacctaatactctgggtcatattatagatttaatgtccgaagagacgatagattttggtgaaattattagtcgtggtaagaaagtaattcagacacttcttaacgaacgcggtgtgaatgtacttaaggatttgcttaaaggaagaatatcatattacgaaatgcctgataaagatctaccaacgataagatatcacggacgtaagtttctagatactagagtagtatattgtcacatgtctaaacttcaagagagagattatatgattactagacgacagctatgttatcatgaaatgtttgataaaaatatgtataacgtgtcaatggcagtattgggacaacttaatctgatgaataatttagatactttatttcaggaacaggataaggaattgtacccaaatctgaaaataaataatggcgtgttatacggagaagaattggtaacgttaaacattagttccaaatttaaatactttattaatcggatacagacactcaacggaaaacattttatatacttttctaattctacatatggcggattggtaattaaatatatcatgctcagtaatggatattctgaatataatggttctcagggaactaatccacatatgataaacggcaaaccaaaaacatttgctatcgttactagtaaaatgaaatcgtctttagaggatctattagatgtgtataattctcctgaaaacgatgatggtagtcaattgatgtttttgttttcatcaaacattatgtccgaatcctatactctaaaagaggtaaggcatatttggtttatgactatcccagatactttttctcaatacaaccaaattcttggacgatctattagaaaattctcttacgccgatatttctgaaccagttaatgtatatcttttagccgccgtatattccgatttcaatgacgaagtgacgtcattaaacgattacacacaggatgaattaattaatgttttaccatttgacatcaaaaagctgttgtatctaaaatttaagacgaaagaaacgaatagaatatactctattcttcaagagatgtctgaaacgtattctcttccaccacatccatcaattgtaaaagttttattgggagaattggtcagacaatttttttataataattctcgtattaagtataacgataccaagttacttaaaatggttacatcagttataaaaaataaagaagacgctaggaattacatagatgatattgtaaacggtcacttctttgtatcgaataaagtatttgataaatctcttttatacaaatacgaaaacgatattattacagtaccgtttagactttcctacgaaccatttgtttggggagttaactttcgtaaagaatataacgtggtatcttctccataaaactgatgagatatataaagaaataaatgtcgagctttgttaccaatggatacctttccgttacattggaacctcatgagctgacgttagacataaaaactaatattaggaatgccgtatataagacgtatctccatagagaaattagtggtaaaatggccaagaaaatagaaattcgtgaagacgtggaattacctctcggcgaaatagttaataattctgtagttataaacgttccgtgtgtaataacctacgcgtattatcacgttggggatatagtcagaggaacattaaacatcgaagatgaatcaaatgtaactattcaatgtggagatttaatctgtaaactaagtagagattcgggtactgtatcatttagcgattcaaagtactgcttttttcgaaatggtaatgcgtatgacaatggcagcgaagtcactgccgttctaatggaggctcaacaaggtatcgaatctagttttgtttttctcgcgaatatcgtcgactcataaaaaagagaatagcggtaagtataaacacgaatactatggcaataattgcgaatgttttattctcttcgatatatttttgataatatgaaaaacatgtctctctcaaatcggacaaccatctcataaaatagttctcgcgcgctggagaggtagttgccgctcgtataatctctccagaataatatacttgcgtgtcgtcgttcaatttatacggatttctatagttctctgttatataatgcggtttgccctcatgattagacgacgacaatagtgttctaaatttagatagttgatcagaatgaatgtttattggcgttggaaaaattatccatacagcgtctgcagagtggttgatagttgttcctagatatgtaaaataatccaacttactaggcagcaaattgtctagataaaatactgaatcaaacggtgcagacgtattggcggatctaatggaatccaattgattaactatcttttgaaaatatacatttttatgatccaatacttgtaagaatatagaaataatgataagtccatcatcgtgtttttttgcctcttcataagaactatattttttcttattccaatgaacaagattaatctctccagagtatttgtacacatctatcaagtgattggatccataatcgtcttcctttccccaatatatatgtagtgatgataacacatattcattggggagaaaccctccacttatatatcctcctttaaaattaatccttactagttttccagtgttctggatagtggttggtttcgactcattataatgtatgtctaacggcttcaatcgcgcgttagaaattgcttttttagtttctatattaataggagatagttgttgcggcatagtaaaaatgaaatgataactgtttaaaaatagctcttagtatgggaattacaatggatgaggaagtgatatttgaaactcctagagaattaatatctattaaacgaataaaagatattccaagatcaaaagacacgcatgtgtttgctgcgtgtataacaagtgacggatatccgttaataggagctagaagaacttcattcgcgttccaggcgatattatctcaacaaaattcagattctatctttagagtatccactaaactattacggtttatgtactacaatgaactaagagaaatctttagacggttgagaaaaggttctatcaacaatatcgatcctcactttgaagagttaatattattgggtggtaaactagataaaaaggaatctattaaagattgtttaagaagagaattaaaagaggaaagtgatgaacgtataacagtaaaagaatttggaaatgtaattctaaaacttacaacacgggataaattatttaataaagtatatataagttattgcatggcgtgttttattaatcaatcgttggaggatttatcgcatactagtatttacaatgtagaaattagaaagattaaatcattaaatgattgtattaacgacgataaatacgaatatctgtcttatatttataatatgctagttaatagtaaatgaacttttacagatctagtataattagtcagattattaagtataatagacgactagctaagtctattatttgcgaggatgactctcaaattattacactcacggcattcgttaaccaatgcctatggtgtcataaacgagtatccgtgtccgctattttattaactactgataacaaaatattagtatgtaacagacgagatagttttctctattctgaaataattagaactagaaacatgtttagaaagaaacgattatttctgaattattccaattatttgaacaaacaggaaagaagtatactatcgtcatttttttctctagatccagctactactgataatgatagaatagacgctatttatccgggtggcatacccaaaaggggtgagaatgttccagagtgtttatccagggaaattaaagaagaagttaatatagacaattcttttgtattcatagacactcggttttttattcatggcatcatagaagataccattattaataaattttttgaggtaatcttctttgtcggaagaatatctctaacgagtgatcaaatcattgatacatttaaaagtaatcatgaaatcaaggatctaatatttttagatccgaattcaggtaatggactccaatacgaaattgcaaaatatgctctagatactgcaaaacttaaatgttacggccatagaggatgttattatgaatcattaaaaaaattaactgaggatgattgattaaaaaatataaattaatttaccatcgtgtatttttataacgggattgtccggcatatcatgtagatagttaccgtctacatcgtatactcgaccatctacgcctttaaatcctctatttattgacattaatctattagaattggaataccaaatattagtaccctcaattagtttattggtaatattttttttagacgatagatcgatggctcttgaaaccaaggttttccaaccggactcattgtcgatcggtgagaagtctttttcattagcatgaatccattctaatgatgtatgtttaaacactctaaacaattggacaaattcttttgatttgctttgaatgatttcaaataggtcttcgtctacagtaggcataccattagataatctagccattataaagtgcacgtttacatatctacgttctggaggagtaagaacgtgactattgagacgaatggctcttcctactatctgacgaagagacgcctcgttccatgtcatatctaaaatgaagatatcattaattgagaaaaaactaataccctcgcctccactagaagagaatacgcatgttttaatgcattctccgttagtgtttgattcttggttaaactcagccaccgccttgattctagtatcttttgttctagatgagaactctatattagagataccaaagactttgaaatatagtaataagatttctattcctgactgattaacaaatggttcaaagactagacatttaccatgggatgctaatattcccaaacatacatctataaatttgacgcttttctcttttaattcagtaaatagagagatatcagccgcactagcatcccctttcaatagttctccctttttaaaggtatctaatgcggatttagaaaactctctatctcttaatgaatttttaaaatcattatatagtgttgctatctcttgcgcgtattcgcccggatcacgattttgtctttcaggaaagctatcgaacgtaaacgtagtagccatacgtctcagaattctaaatgatgatatacctgtttttatttcagcgagtttagccttttgataaatttcttcttgctttttcgacatattaacgtatcgcattaatactgttttcttagcgaatgatgcagacccttctacgtcatcaaaaatagaaaactcgttattaactatatacgaacatagtcctcctagtttggagactaattctttttcatcgactagacgtttattctcaaatagtgattggtgttgtaaggatcctggtcgtagtaagttaaccaacatggtgaattcttgcacactattgacgataggtgtagccgataaacaaatcatcttatggttttttaacgcaatggtcttagataaaaaattatatactgaacgagtaggacggatcttaccatcttctttgattaatgatttagaaatgaagttatgacattcatcaatgatgacgcatattctactcttggaattaatagttttgatattagtaaaaaatttatttctaaaattttgatcatcgtaattaataaaaatacaatccttcgttatctctggagcgtatctgagtatagtgttcatccaaggatcttctatcaaagcctttttcaccaataagataatagcccaattcgtataaatatccttaagatgtttgagaatatatacagtagtcattgttttaccgacacccgtttcatggaacaataaaagagaatgcatactgtctaatcctaagaaaactcttgctacaaaatgttgataatccttgaggcgtactacgtccgaccccatcatttcaacgggcatattagtagttctgcgtaaggcataatcgatataggccgcgtgtgatttactcatttatgagtgataagtaataactatgttttaaaaatcacagcagtagtttaactagtcttctctgatgtttgttttcgatactttttgaatcagaagtcatactagaataaagcaacgagtgaacgtaatagagagcttcgtatactctattcgaaaactctaagaacttattaatgaattccgtatccactggattgtttaaaatactaaattgaacactgttcacatccttccaagaagaagacttagtgacggacttaacatgagacataaataaatccaaattttttttacaaacatcactagccaccataatggcgctatctttcaaccagctatcgcttacgcattttagcagtctaacatttttaaagagactacaatatattctcatagtatcgattacacctctaccgaataaagttggaagtttaataatacaatatttttcgtttacaaaatcaaataatggtcgaaacacgtcgaaggttaacatcttataatcgctaatgtatagattgttttcagtgagatgattattagatttaatagcatctcgttcacgtttgaacagtttattgcgtgcgctgaggtcggcaactacggcgtccgctttagtactcctcccataatactttacgctattaatctttaaaatttcatagactttatctagatcgctttctggtaacatgatatcatgtgtaaaaagttttaacatgtcggtcggcattctatttagatcattaactctagaaatctgaagaaagtaattagctccgtattccagactaggtaatgggcttttacctagagacagattaagttctggcaatgtttcataaaatggaagaaggacatgcgttccctcccggatattttttacaatttcatccatttacaactctatagtttgttttcattattattagttattatctcccataatcttggtaatacttaccccttgatcgtaagataccttatacaggtcattacatacaactaccaattgtttttgtacataatagattggatggttgacatccatggtggaataaactactcgaacagatagtttatctttccccctagatacattagccgtaatagttgtcggcctaaagaatatctttggtgtaaagttaaaagttagggttcttgttccattattgctttttgtcagtagttcattataaattctcgagatgggtccgttctctgaatatagaacatcatttccaaatctaacttctagtctagaaataatatcggtcttattcttaaaatctattcccttgatgaagggatcgttaatgaacaaatccttggcctttgattcggctgatctattatctccgttatagacgttacgttgactagtccaaagacttacaggaatagatgtatcgatgatgttgatactatgtgatatgtgagcaaagattgttctcttagtggcatcactatatgttccagtaatggcggaaaactttttagaaatgttatatataaaagaattttttcgtgttccaaacattagcagattagtatgaagataaacactcatattatcaggaacattatcaatttttacatacacatcagcatcttgaatagaaacgataccatcttctggaacctctacgatctcggcagactccggataaccagtcggtgggccatcgctaacaataactagatcatccaacaatctactcacatatgcatctatataatctttttcatcttgtgagtaccctggatacgaaataaatttattatccgtatttccataataaggtttagtataaacagagagagatgttgccgcatgaacttcagttacagtcgccgttggttggtttatttgacctattactctcctaggtttctctataaacgatggtttaatttgtacattcttaaccatatatccaataaagctcaattcaggaacataaacaaattctttgttgaacgtttcaaagtcgaacgaagagtcacgaataacgatatcggatactggattgaaggttaccgttacggtaatttttgaatcggatagtttaagactgctgaatgtatcttccacatcaaacggagttttaatataaacgtatactgtagatggttctttaatagtgtcattaggagttaggccaatagaaatatcattaagttcactagaatatccagagtgtttcaaagcaattgtattattgatacaattattatataattcttcgccctcaatttcccaaataacaccgttacacgaagagatagatacgtgattaatacatttatatccaacatatggtacgtaactgaatcttcccatacctttaacttctggaagttccaaactcagaaccaaatgattaagcgcagtaatatactgatccctaatttcgaagctagcgatagcctgattgtctggaccatcgtttgtcataactccggatagagaaatatattgcggcatatataaagttggaatttgactatcgactgcgaagacattagaccgtttaatagagtcatccccaccgatcaaagaattaatgatagtattattcattttctatttaaaatggaaaaagcttacaataaactccgtagagaaatatctataatttgtgagttttccttaaagtaacagcttccgtaaacgccgtctttatctcttagtaggtttattgtatttatgaccttttccttatcttcatagaatactaaaggcaacaaagaaatttttggttcttctctaagagctacgtgagacttaaccatagaagccaacgaatccctacatattttagaacagaaataccctacttcaccacccttgtatgtctcaatactaataggtctaaaaaccaaatcttgattacaaaaccaacacttatcaattacactatttgtcttaatagacacatctgccatagatttataatactttggtagtatacaagcgagtgcttcttctttagcgggcttaaagactgctttaggtgctgaaataaccacatctggaaggcttactcgcttagccatttaattacggaactatttttttatacttctaatgagcaagtagaaaacctctcatctacaaaaacgtactcgtgtccataatcctctaccatagttacacgttttttagatctcatatgtgctaaaaagttttcccatactaattggttactattatttttcgtataatttttaacagtttgaggttttagatttttagttacagaagtgatatcgaatattttatccaaaaagaatgaataattaattgtcttagaaggagtgttttcttggcaaaagaataccaagtgcttaaatatttctactacttcattaatcttttctgtactcagattcagtttctcatcttttacttgattgattatttcaaagactaacttataatcctttttatttattctctcgttagccttaagaaaactagatacaaaatttgcatctacatcatccgtggatatttgatttttttccatgatatccaagagttccgagataatttctccagaacattgatgagacaataatctccgcaatacatttctcaaatgaataagtttattagacacgtggaagtttgactttttttgtacctttgtacatttttgaaataccgactcgcaaaaaatacaatattcatatccttgttcagatactataccgttatgtctacaaccgctacataatcgtagattcatgttaacactctacgtatctcgtcgtccaatattttatataaaaacattttatttctagacgttgccagaaaatcctgtaatatttttagttttttgggctgtgaataaagtatcgccctaatattgttaccgtcttccgccaatatagtagttaaattatccgcacatgcagaagaacaccgcttaggcggattcagtacaatgttatatttttcgtaccaactcatttaaatatcataatctaaaatagttctgtaatatgtctagcgctaatatattgatcataatcctgtgcataaattaagatacaacaatgtctcgaaatcatcgacatggcttcttccatagttagaagatcgtcgtcaaagttagcaacgtgattcatcaacatttgctgttttgaggcagcaaatactgaaccgtcgccattcaaccattcataaaaaccatcgtctgaatccattgataatttcttgtactggtttttgagagctcgcatcaatctagcatttctagctcccggattgaaaacagaaagaggatcgtacatccagggtccattttctgtaaatagaatcgtataatgtcccttcaagaagatatcagacgatccacaatcaaagaattggtctccgagtttgtaacaaactgcggactttaacctatacatgataccgtttagcataatttctggtgatacgtcaatcggagtatcatctattagagatctaaagccggtgtaacattctccaccaaacatattcttattctgacgtcgttctacataaaacatcattgctccattaacgataacaggggaatgaacagcactacccatcacattagttcccaatggatcaatgtgtgtaactccagaacatcttccatagcctatgttaggaggagcgaacaccactcttccactattgccatcgaatgccatagaataaatatccttggaattgatagaaatcggactgtcggatgttgtgatcatcttcataggattaacaactatgtatggtgccgcctgaagtttcatatcgtaactgatgccgtttataggtctagccacagaaaccaacgtaggtctaaatccaactatagacaaaatagaagccaatatctgttcctcatctgtcataacttgagagcatccagtatgaataatcttcattagatggggatctaccgcatcatcatcgttacaataaaaaattcccattctaatgttcataattgcttttctaatcatggtatgcatgtttgctctctgaatctctgtggaaattagatctgatacacctgtaatcactatcggattatcctccgtaagacgattaaccaacaacatataattataagactttacttttctaaattcataaagttgctggattaggctataggtgtctccatgtacatacgcgttctcgagcgcaggaagtttaataccgaatagtgccatcagaataggatgaatatagtaattagtttctggttttctataaataaaagacaaatcttgtgaactagacatatcggtaaaatgcatggattggaatcgtgtagtcgacagaagaatatgatgattagatggagagtatattttatctaactctttgagttggtcaccgattctaggactagctcgagaatgaataagtactaaaggatgagtacatttcacagaaacactagcattgttcaatgtgctctttacatgggtaaggagttgaaatagctcgtttctatttgttctgacaatatttagtttattcataatgttaagcatatcctgaatagtaaagttagatgtgtcatacttgttagtagttagatatttagcaattgcattcccatcatttctcaatctcgtactccaatcatgtgtagatgctacttcgtcgatggaaaccatacaatcctttttgataggctgttgagattgatcatttcctgcacgtttaggtttggtacgttgatttctagcccctgcggatataaagtcatcgtctacaatttgggacaatgaattgcatacactacaagacaaagatttatcagaagtgtgaatatgatcttcatctaccaaagaaagagtttgattagtataactagattttagtcctgcgttagatgttaaaaaaacatcgctattgaccacggcttccattatttatattcgtagtttttactcgaaagcgtgattttaatatccaatcttattacttttggaatcgttcaaaacctttgactagttgtagaatttgatctattgccctacgcgtatactcccttgcatcatatacgttcgtcaccagatcgtttgtttcggcctgaagttggtgcatatctctttcaacattcgacatgagatccttaagggccatatcgtctagattttgttgagatgctgctcctggatttggattttgttgtgctgttgtacatactgtaccaccagtaggtgtaggagtacatacagtggccacaataggaggttgagaaagtgtaaccgttggagtagtacaagaaatacttccatccgattgttgtgtacatgtagttgttggtaacgtctgagaaggttgggtagatggcggcgtcgtcgttttttgatctttattaaatttagagataatatcctgaacagcattgctcggcgtcaacgctggaaggagtgaactcgccggcgcatcagtatcttcagacagccaatcaaaaagattagacatatcagatgatgtattagtttgttgtcgtggttttggtgtaggagcagtactactaggtagaagaataggagccgatgtagctgttggaaccggctgtggagttatatgaatagttggttgtagcggttggataggctgtctgctggcggccatcatattatctctagctagttgttctcgcaactgtctttgataatacgactcttgagactttagtcctatttcaatcgcttcatcctttttcgtatccggatccttttcttcagaataatagattgacgactttggtgtagaggattctgccagcctctgtgagaacttgttaaagaagtccatttaaggctttaaaattgaattgcgattataagattaaatggcagacacagacgatattatcgactatgaatccgatgatctcaccgaatacgaggatgatgaagaagaggaagaagatggagagtcactagaaactagtgatatagatcccaaatcttcttataagattgtagaatcagcatccactcatatagaagatgcgcattccaatcttaaacatatagggaatcatatatctgctcttaaacgacgctatactagacgtataagtctatttgaaatagcgggtataatagcagaaagctataacttgcttcaacgaggaagattacctctagtttcagaattttctgacgaaacgatgaagcaaaatatgctacatgtaattatacaagagatagaggagggttcttgtcctatagtcatcgaaaagaacggagaattgttgtcggtaaacgattttgacaaagatggtctaaaattccatctagactatattatcaaaatttggaaacttcaaaaacgatattagaatttatacgaatatcgttctctaaatgtcacaatcaagtctcgcatgttcagcaatttattgtcgtactttatatcgtgttcattaacgatatcttgcaaaatagtaatgattctatcttccttcgatagatattcttcagagattattgtcttatattctttcttgttatcagatatgaatttgataagactttgaacattattgatacccgtctgtttaattttttctacagatattttagttttggcagattctatcgtatctgtcaatagacatccaacatcgacattcgacgtcaattgtctataaatcaacgtataaattttagaaataacattagcgaattgttgtgcgttgatgtcgttattctgaaacagtatgattttaggtagcattttcttaacaaagagaacgtatttattgttactcagttgaacagatgatatatccagattactaacgcatctgattccgtataccaaactttcagaagaaatggtatacaattgtttgtattcattcaatgtctctttttcagaaattagtttagagtcgaatactgcaataattttcaagagatagttttcatcagataagattttatttagtgtagatatgataaaactattgttttgttggagaacttgatacgccgcgttctctgtagtcgacgctctcaaatgggaaacaatctccattatttttttggaatcggatactatatcttcggtatcttgacgcagtctagtatacatagagttaagagagattagagtttgtacattaagcaacatgtctctaaatgtggctacaaacttttcctttttcacatcatctagtttattatataccgatttcacaacggcaccagatttaaggaaccagaatgaaaaactctgataactacaatatttcatcatagttacgattttatcatcttctatagttggtgtaatagcgcatacctttttctccaagactggaaccaacgtcataaaaatgtttaaatcaaaatccatatcaacatctgatgcgctaagaccagtctcgcgttcaagattatctttactaatggtgacgaactcatcgtataaaactctaagtttgtccattatttatttacagatttagttgtttaatttatttgtgctcttccagagttgggatagtatttttctaacgtcggtattatattattaggatctacgttcatatgtatcataatattaatcatccacgttttgataaatctatctttagcttctgaaataacgtatttaaacaaaggagaaaaatatttagctacggcatcagacgcaataacattttttgtaaatgtaacgtatttagacgacagatcttcgttaaaaagttttccatctatgtagaatccatcggttgttaacaccattcccgcgtcagattgaataggagtttgaatagtttgttttggaaatagatccttcaataacttatagttgggtgggaaaaaatcgattttatcactagactctttcttttttactatcattacctcatgaactatttcttgaatgagtatatgtattttctttcctatatcggacgcgttcattggaaaatataccatgtcgttaactataagaatatttttatcctcgtttacaaactgaataatatcagatgtagttcgtaaacgaactatatcatcaccagcacaacatctaactatatgatatccactagtttcctttagccgtttattatcttgttccatattagcagtcattccatcatttaagaaggcgtcaaagataatagggagaaatgacattttggattctgttacgactttaccaaaattaaggatatacggacttactatctttttctcaacgtcaatttgatgaacacacgatgaaaatgtgcttctatgagattgatcatgtagaaaacaacaagggatacaatatttccgcatatcatgaaatatattaagaaatcccaccttattatatttccccaaaggatccatgcacgtaaacattatgccgttatcattaataaagacttctttctcatcggatctgtaaaagttgttactgatttttttcattccaggatctagataattaataatgatgggttttctattcttattctttgtattttggcatatcctagaccagtaaacagtttccactttggtaaaatcagcagacttttgaacgctattaaacatggcattaatggcaataactaaaaatgtaaaatatttttctatgttaggaatatggtttttcactttaatagatatatggtttttggccaaaatgatagatatttttttatccgaggatagtaaaatattattagtcgccgtctctataaaaatgaagctagtctcgatatccaattttattctagaattgataggagtcgccaaatgtaccttatacgttatatctcccttgatgcgttccatttgtgtatctatatcggacacaagatctgtaaatagttttacgttattaatcatcacggtatcgccgtcgctagataacgctaatgtaccatccaagtcccaaatggagagatttaactgttcatcgtttagaataaaatgattaccggtcatattaataaagtgttcatcgtatctagataacaacgacttataattaatgtccaagtcttgaactcgctgaatgatcttttttaacccagttagttttagattggtacgaaatatattgttaaactttgattctacagtaatgtccaaatctagttgtggaaatacttccatcaacattgtttcaaacttgataatattattatctacatcttcgtacgatccaaattccggaatagatgtatcgcacgctctggccacccagataaccaaaaagtcacacgctccaggatatacattgtataaaaagctatcgttttttagtagggtttttttctgcgtgtatacgaagggattaaaaatagtattatcaacgtaactatattccaaattattcttatgagaatagataataatatcgtccttaatatctaacaaatttcctaaatatccctttaattgagtcattcgaagcgtcaatagaatatgtctcttaactatttccggctgttgtatatttaaatgacttcgtaaaaaataatatatgggcgacttctcatctatgtaatcatatggagtgagatatagggctcgttctacctcctgccccttacccacctgtaataccaattgcggacttactatatatcgcatatttatatcgtggggtaaagtgaaaatctactaccgatgatgtaagtcttacaatgttcgaaccagtaccagatcttaatttggaggcctccgtagaactaggggaggtaaatatagatcaaacaacacctatgataaaggagaatagcggttttatatcccgcagtagacgtctattcgcccatagatctaaggatgatgagagaaaactagcactacgattctttttacaaagactttattttttagatcatagagagattcattatttgttcagatgcgttgacgctgtaaaagacgtcactattaccaaaaaaaataacattatcgtggcgccttatatagcacttttaactatcgcatcaaaaggatgcaaacttacagaaacaatgattgaagcattctttccagaactatataatgaacatagtaagaaatttaaattcaactctcaagtatccatcatccaagaaaaactcggataccagtttggaaactatcacgtttatgattttgaaccgtattactctacagtagctctggctattcgagatgaacattcatctggcatttttaatatccgtcaagagagttatctggtaagttcattatctgaaataacatatagattttatctaattaatctaaaatctgatcttgttcaatggagtgctagtacgggcgctgtaattaatcaaatggtaaatactgtattgattacagtgtatgaaaagttacaactggtcatagaaaatgattcacaatttacatgttcattggctgtggaatcaaaacttccaataaaattacttaaagatagaaatgaattatttacaaaattcattaacgagttaaaaaagaccagttcattcaagataagcaaacgcgataaggatacgctactaaaatattttacttaggactggagttagaatttatagacgactcatttcgtttatcattgttactattattactattactatcattattagtgttggcattattagtattcttcttgtcatcttgttcagaaatatacagcaatgctatacctaatactaaatacattatcatgctcgcaatggctctaacaacaacgaaccaaaatgaatttggtcgtagcttttgttcacaaaaatacataaagaaatgtctacataaatctatggcgccattggctacttgaaatagcgccagtcctcctacagattttaatatagctgtataacatgacatttattcatcatcaaaagagacagagtcaccatctgtcatatttagattttttttcatgtgttcaaagtatcctctactcatttcattataatagtttatcatacttagaattttaggacggatcaatgagtaagacttgactagatcgtcagtagtaatttgtgcatcgtctattctgcatccgcttcgtcgaataatgtatagcatcgctttgagattctccatagctatcaagtctttatacaatgacatggaaatatctgtgaatactttatacttctccaacatcgatgccttaacatcatcgcctactttagcattgaaaatacgttctattgtgtagatggatgtagcaagatttttaaacaacaatgccatcttacacgatgattgcctcaagtctccaatcgtttgtttagaacgattagctacagagtccaatgcttggctgactagcatattattatctttagaaattgtattcttcaatgaggcgtttatcatatctgtgatttcgttagtcatattacagtctgactgggttgtaatgttatccaacatatcacctatggatacggtacacgtaccagcatttgtaataatcctatctaagatgttgtatggcattgcgcagaaaatatcttctcctgtaatatctccactctcgataaatctactcagattattcttaaatgccttattctctggagaaaagatatcagtgtccatcatttcattaatagtatacgcagaaaagataccacgagtatcaattctatccaagatacttatcggttccgagtcacagataatggtttcctctccttcgggagatcctgcatagaaatatctaggacaatagtttctatactgtctgtaactctgataatctctaaagtcactaactgataccatgaaattgagaagatcaaacgctgaagtaattaatttttctgcctcgtttttactacaactagttttcatcaatgtagtgacgatgtattgtttagttacttttggtctaatactgatgatagagatattattgcttcccataatggatcttctagtagtcaccttaaagcccattgatgcgaatagcagatagataaagtcttggtatgactcctttctaatatagtacggactacctttgtcacccaactttatacccacataagccataacaacctctttaatagccgtttcatgaggtttatcagccatgagcctgagtagttggaagaatctcatgaatcccgtctcagaaagtcctatatgcatgatagatttatctttcctgggaaactctcgtatagtcatagatgaaatactctttaaagtttctgaaataagattagtaacagtcttacctccgactactctaggtaacaaacaaactctaataggtgttttctctgcggagataatatcagaaaggatagagcaataagtagtattattgtgattataaagaccgaatacataacaggtagaatttataaacatcatgtcctgaaggtttttagacttgtattcctcgtaatccataccgtcccaaaacatggatttggtaactttgatagccgtagatctttgttccttcgccaacaggttaaagaaattaataaagaatttgttgtttctatttatgtccacaaattgcacgtttggaagcgccacggttacattcactgcagcattttgaggatcgcgagtatgaagtacgatgttattgtttactggtatatctggaaagaaatctaccagtctaggaataagagattgatatcgcatagaaatagtaaagtttataatctcatcatcgaagagcattttgttaccattgtaataaatatccactctgtcatatgtataaatgaagtactgttcaaacatgatgagatgtttatatgttggcatagtagtgagatcgacgtttggtaatggcaatgtattaagattaactccataatgtctagcagcatctgcgatgttataagcgtcgtcaaagcggggtcgatcttgtattgttatatattgtctaacacctataagattatcaaaatcttgtctgcttaatacaccgttaacaatttttgccttgaattcttttattggtgcattaataacatccttatagaggatgttaaacaaataagtgttatcaaagttaagatctggatatttcttttctgctagaacatccattgagtcggagccatctggtttaatataaccaccgataaatctagctctgtattctgtatccgtcaatctaatattaagaaggtgttgagtgaaaggtggaagatcgtaaaagctgtgagtattaatgataggattagtttccgaactaatgttaattggggtattaataatatctatatttccagcgttaagtgtaacattaaacagttttaattcacgtgacgtggtatcaattaaataattaatgcccaatttggatatagcagcctgaagctcatcttgtttagttacggatcctaatgagttattaagcaatatatcgaacggatgaacgaaggttgttttaagttggtcacatactttgtaatctagacatagatgcggaagaacggtagaaactatacgaaataaatattcagagtcctctaattgatcaagagtaactattgacttaataggcatcatttatttagtattaaatgacgaccgtaccagtgacggatatacaaaacgatttaattacagagttttcagaagataattatccatctaacaaaaattatgaaataactcttcgtcaaatgtctattctaactcacgttaacaacgtggtagatagagaacataatgccgccgtagtgtcatctccagaggaaatatcctcacaacttaatgaagatctatttccagatgatgattcaccggccactattatcgaacgagtacaacctcatactactattattgacgatactccacctcctacgtttcgtagagagttattaatatcggaacaacgtcaacaacgagaaaaaagatttaatattacagtatcgaaaaatgctgaagcaataatggaatctagatctatgataacttctatgccaacacaaacaccatccttgggagtagtttatgataaagataaaagaattcagatgttagaggatgaagtggttaatcttagaaatcaacgatctaatacaaaatcatctgataatttagataattttaccaaaatactatttggtaagactccgtacaaatcaacagaagttaataagcgtatagccatcgttaattatgcaaatttgaacgggtcccccttatcagtcgaggacttggatgtttgttcggaggatgaaatagatagaatctataaaacgattaaacaatatcacgaaagtagaaaacgaaaaattatcgtcactaacgtgattattattgtcataaacattatcgagcaggcattgctaaaactcggatttgaagaaatcaaaggactgagtaccgatatcacttcagaaattatcgatgtggagatcggagatgactgcgatgctgtagcatctaaactaggaatcggtaacagtccggttcttaatattgtattgtttatactcaagatattcgttaaacgaattaaaattatttaatttaatacattcccatatccagacaacaatcgtctggattaatctgttcctgtcgtctcataccggacgacatattaatctttttattagtgggcatctttttagatggtttctttttcccagcattaactgagtcgatacctagaagatcgtgattgatctctccgaccattccacgaacttctaattggccgtctctgacggtaccataaactattttaccagcattagtaacagcttggacaatctgaccatccatcgcattgtacgatgtagtagtaactgttgttctacgtctaggagcaccagaagtatttttggagcccttggatgttgatgtagaagaagacgaggattttgattttggtttacatgtaatacattttgaactctttgattttgtatcacatgcgccggcagtcacatctgtttgagaattaagattattgttgcctcctttgacggctgcatctccaccgatttgcgctagtagatttttaagctgtggtgtaatcttattaactgtttcgatataatcatcgtaactgcttctaacggctaaattttttttatccgccatttagaagctaaaaatatttttatttatgcagaagatttaactagattatacaatgaactaatatgatccttttccagattatttacaaacttggtattttttggttctggaggaggcgaatttaaattcggacttggattcggattttgtaagttcttgatcttattatacatcgagtataggatggcgacagtaactgctacacaaataccgatcaaaagaagaataccaatcatttattgacaataacttcactattgatcaagtatgcaatatatcatcttttcactaaataagtagtaataatgattcaacaatgtcgagatatatggacgataataatttagttcatggaaatatcgctatgattggtgtgaatgactccgctaactctgtggggtgcgcagtgctttccccacatagaataaattagcattccgactgtgataataataccaagtataaacgccataatactcaatactttccatgtacgagtgggactggtagacttactaaagtcaataaaggcgaagatacacgaaagaatcaaaagaatgattccagcgattagcacgccggaaaaataatttccaatcataagcatcatgtccatttaactaataaaaattttaaatcgccgaatgaacaaagtggaatataaaccatataaaaacaatagtttgtactgcaaaaataatatctatttttgttttcgaagatatggtaaaattaaatagtagtacacagcatgttataactaacagcagcaacggctcgtaattacttatcatttactagacgaaaaggtggtgggatattttcttgctcaaataatacgaatatatcacccatccattttatgcgatgtttatatactctaatctttaatagatctatagacgacgggtttaccaacaatatagattttatcgattcatctaatttaaacccttccttaaacgtgaatgatctattatctggcataacgatgaccctacctgatgaatcggacaatgtactgggccatgtagaataaattatcaacgaattatcgtctacgaacatttatatcatttgttttaattttaggacgcgaataaatggatataaaatagaaaataacagatattacaaccagtgttatggccgcgcccaaccaggtaggcagttttattttatcttttactacaggttctcctggatgtacgtcaccaacggcggacgtagttctagtacaattagacgtaagttccgcttgggaattttttaacgctaaagagttaacgttaatcgtgcacccaacgtatttacatctagttcgttgaacatcttgattataatataaccattttctatctctagattcgtcagtgcactcatgtaaccaacataccctaggtcctaaatatttatctccggaattagattttggataattcgcgcaccaacaatttctatttcctttatgatcgttacaaaagacgtataatgccgtatccccaaaagtaaaataatcaggacgaataattctaataaactcagaacaatatctcgcatccatatgtttggagcaaatatcggaataagtagacatagccggtttccgttttgcacgtaaccattctaaacaattggggtttccaggatcgtttctacaaaatccagtcatgaaatcgtcacaatgttctgtcttgtaattattattaaatatttttggacagtgtttggtatttgtcttagaacaacattttgccacgctatcactatcgcccaggagataatccttttttataaaatgacatcgttgcccggatgctatataatcagtagcgtgttttaaatccttaatatattcaggagttacctcgttctgataatagattaatgatccaggacgaaatttgaaagaactacatggttctccatgaattaatacatattgtttagcaaattcaggaactataaaactactacaatgatctatcgacataccatctatcaaacaaaacttgggtttaatttctcccggagatgtttcataatagtacgtataactttcttctgcaaacttaacagctctattatattcaggataattaaaacctaattccatatatttgtctcgtatatctgctattcctggtgctattttgattctattaagagtaacagctgcccccattcttaataatcgtcagtatttaaactgttaaatgttggtatatcaacatctaccttatttcccgcagtataaggtttgttgcaggtatactgttcaggaatggttacatttatacttcttctatagtcctgtctttcgatgttcatcacatatgcaaagaacagaataaacaaaataatgtaagaaataatattaaatatctgtgaattcgtaaatacattgattgccataataattacagcagctacaatacacacaatagacattcccacagtgttgccattacctccacgatacatttgagttactaagcaataggtaataactaagctagtaagaggcaatagaaaagatgagataaatatcatcaatatagagattagaggagggctatatagagccaagacgaacaaaatcaaaccgagtaacgttctaacatcattatttttgaagattcccaaataatcattcattcctccataatcgttttgcatcatacctccatctttaggcataaacgattgctgctgttcctctgtaaataaatctttatcaagcactccagcacccgcagagaagtcgtcaagcatattgtaatatcttaaataactcatttatatattaaaaaatgtcactattaaagatggagtataatctttatgccgaactaaaaaaaatgacttgtggtcaacccctaagtctttttaacgaagacggggatttcgtagaagttgaaccgggatcatcctttaagtttctgatacctaagggattttacgcctctccttccgtaaagacgagtctagtattcgagacattaacaacgaccgataataaaatcactagtatcaatccaacaaatgcgccaaagttatatcctcttcaacgcaaagtcgtatctgaagtagtttctaatatgaggaaaatgatcgaatcaaaacgtcctctatacattactcttcacttggcgtgtggatttggtaagactattaccacgtgttatcttatggctacacacggtagaaaaaccgtcatttgcgtacccaataaaatgttaatacatcaatggaagacacaggtagaggcagtcggattggaacataagatatccatagatggagtaagtagtctattaaaggaactaaagactcaaagtccggatgtattaatagtagtcagtagacatctgacaaacgatgccttttgtaaatatatcaataagcattatgatttgttcatcttggatgaatcacatacgtataatctgatgaacaatacagcagttacaagatttttagcgtattatcctccgatgatgtgttattttttaactgctacacctagaccatctaaccgaatttattgtaacagtattattaatattgccaagttatccaatctaaaaaaaactatctatgcagtagatagtttttttgagccatattccacagataatattagacatatggtaaaacgactagatggaccatctaataaatatcatatatataccgagaagttattatctgtagacgagcctagaaatcaacttattcttgataccctggtagaagaattcaagtcaggaactattaatcgcattttagttattactaaactacgtgaacatatggtattattctacaaacgattattagattttttcggaccagaggttgtatttataggagacgcccaaaatagacgtactccagatatggtcaaatcaatcaaggaactaaatagatttatattcgtatccaccttattttattccggtactggtttagatattcctagtttggattcgttgttcatttgctcggcagtaatcaacaatatgcaaatagagcaattactagggagggtatgtcgagaaacagaactattagataggacggtatatgtatttcctaacacatccatcaaagaaataaagtacatgataggaaatttcatgcaacgaattattagtctgtctgtagataaactaggatttaaacaaaaaagttatcggaaacatcaagaatccgatcccacttctgcatgtacaacatcatccagagaagaacgtgtattaaatagaatatttaactcgcaaaatcgttaagaagtttaagcgacgatccgcatgctgcgcaggccagtgtattacccctcatagtattaatataatccaatgatacttttgtgatgtcggaaatcttaaccaatttagactgacaggcagaacacgtcatgcaatcatcatcgtcatcgataactgtagtcttgggcttctttttgcgactcttcattccggaacgcacattggtgctatccatttaggtagtaaaaaataagtcagaatatgccctataacacgatcgtgcaaaacctggtatatcgtctctatctttatcacaatatagtgtatcgacatttttattattattgacctcgtttatcttggaacatggaatgggaacatttttgttatcaacggccatctttgccttaattccagatgttgtaaaattataactaaacagtctatcatcgacacaaatgaaattcttgtttagacgtttgtagtttacgtatgcggctcgttcgcgtctcattttttcagatattgcaggtactataatattaaaaataagaatgaaataacataggattaaaaataaagttatcatgacttctagcgctgatttaactaacttaaaagaattacttagtctgtacaaaagtttgagattttcagattctgcggctatagaaaagtataattctttggtagaatggggaacatctacttactggaaaataggcgtgcaaaaggtagctaatgtcgagacgtcaatatctgattattatgatgaggtaaaaaataaaccgtttaatattgatccgggctattacattttcttaccggtatattttgggagcgtctttatttattcgaagggtaaaaatatggtagaacttggatctggaaactcttttcaaataccagatgatatgcgaagtgcgtgtaacaaagtattagacagcgataacggaatagactttctgagatttgttttgttaaacaatagatggataatggaagatgctatatcaaaatatcagtctccagttaatatatttaaactagctagtgagtacggattaaacatacccaaatatttagaaattgaaatagaggaagacacattatttgacgacgagttatactctattatagaacgctctttcgatgataaatttccaaaaatatccatatcgtatattaagttgggagaacttagacggcaagttgtagactttttcaaattctcattcatgtatattgagtccatcaaggtagatcgtataggagataatatttttattcctagcgttataacaaaatcaggaaaaaagatattagtaaaagatgtagaccatttaatacgatccaaggttagagaacatacatttgtaaaagtaaaaaagaaaaacacattttccattttatacgactatgatggaaacggaacagaaactagaggagaagtaataaaacgaattatagacactataggacgagactattatgttaacggaaagtatttctctaaggttggtagtgcaggcttaaagcaattgactaataaattagatattaatgagtgcgcaactgtcgatgagttagttgatgagattaataaatccggaactgtaaaacgaaaaataaaaaaccaatcagcatttgatttaagcagagaatgtttgggatatccagaagcggattttataacgttagttaataacatgcggttcaaaatagaaaattgtaaggttgtaaatttcaatattgaaaatactaattgtttaaataacccgagtattgaaactatatatggaaactttaaccagttcgtctcaatctttaatgtcgtcaccgatgtcaaaaaaagattattcgagtgaaataatatgcgcctttgatataggtgcaaaaaatcctgccagaactgttttagaagtcaaggataactccgttagggtattggatatatcaaaattagactggagttctgattgggaaaggcgcatagctaaagatttgtcacaatatgaatacactacagttcttctagaacgtcagcctagaaggtcgccgtatgttaaatttatctattttattaaaggctttttatatcatacatcggctgccaaagttatttgcgtctcgcctgtcatgtctggtaattcatatagagatcgaaaaaagagatcggtcgaagcatttcttgattggatggacacattcggattgcgagactccgttccggatagacgcaaattagacgatgtagcggatagtttcaatttggctatgagatacgtattagataaatggaatactaattatacaccttataataggtgtaaatctagaaattacataaaaaaaatgtaataacgttagtaacgccattatggataatctatttacctttctacatgaaatagaagatagatatgccagaactatttttaactttcatctaataagttgcgatgaaataggagatatatatggtcttatgaaagaacgcatttcctcagaggatatgtttgataatatagtgtataataaagatatacatcctgccattaagaaactagtgtattgcgacatccaacttactaaacacattattaatcagaatacgtatccggtatttaacgattcttcacaagtgaaatgttgtcattatttcgacataaactcagataatagcaatattagctctcgtacagtagagatatttgagagggaaaagtcatctcttgtatcatatattaaaactaccaataagaagagaaaggtcaattacggcgaaataaagaaaactgttcatggaggcactaatgcaaattacttttccggtaaaaagtctgacgagtatctgagtactacagttagatccaacattaatcaaccttggatcaaaaccatctctaagaggatgagagttgatatcattaatcactctatagtaacgcgtggaaaaagctctatattacaaactatagaaattatttttactaatagaacatgtgtgaaaatattcaaggattctactatgcacattattctatccaaggacaaggatgaaaaggggtgtatacacatgattgacaaattattctatgtctattataatttatttctgttgttcgaagatatcatccaaaacgagtactttaaagaagtagctaatgttgtaaaccacgtactcacggctacggcattagatgagaaattattcctaattaagaaaatggctgaacacgatgtttatggagttagcaatttcaaaatagggatgtttaacctgacatttattaagtcgttggatcataccgttttcccctctctgttagatgaggatagcaaaataaagttttttaaggggaaaaagctcaatattgtagcattacgatctctggaggattgtataaattacgtgactaaatccgagaatatgatagaaatgatgaaggaaagatcgactattttaaatagcatagatatagaaacggaatcggtagatcgtctaaaagaattgcttctaaaatgaaaaaaaacactaattcagaaatggatcaacgactagggtataagtttttggtgcctgatcctaaagccggagttttttatagaccgttacatttccaatatgtatcgtattctaattttatattgcatcgattgcatgaaatcttgaccgtcaagcggccactcttatcgtttaagaataatacagaacgaattatgatagaaattagcaatgttaaagtgactcctccagattactcacctataatcgcgagtattaaaggtaagagttatgacgcattagccacgttcactgtaaatatctttaaagaggtaatgaccaaagagggtatatccatcactaaaataagtagttatgagggaaaagattctcatttgataaaaattccgctactaataggatacgggaataaaaatccacttgatacagccaagtatcttgttcctaatgtcataggtggagtctttatcaataaacaatctgtcgaaaaagtaggaattaatctagtagaaaagattacaacatggccaaaatttagggttgttaagccaaactcattcactttctcgttttcctccgtatcccctcctaatgtattaccgacaagatatcgccattacaagatatctctggatatatcacaattggaagcgttgaatatatcatcgacaaagacatttataacggtcaatattgttttgctgtctcaatatttatctagagtgagtctagaattcattagacgtagtttatcatacgatatgcctccagaagttgtctatctagtaaacgcgataatagatagtgctaaacgaattactgaatctattactgactttaatattgatacatacattaatgacctggtggaagctgaacacattaaacaaaaatctcagttaacgattaacgagttcaaatatgaaatgctgcataactttttacctcatatgaactatacacccgatcaactaaagggattttatatgatatctttactaagaaagtttctctactgtatcttccacacttctagatatccagatagagattcgatggtttgtcatcgcatcctaacgtacggcaaatattttgagacgttggcacatgatgaattagagaattacataggcaacatccgaaacgatatcatgaacaatcacaagaacagaggcacttacgcggtaaacattcatgtactaacaactcccggacttaatcacgcgttttctagcttattgagtggaaagttcaaaaagtcagacggtagttatcgaacacatcctcactattcatggatgcagaatatttctattcctaggagtgttggattttatccggatcaagtaaagatttcaaagatgttttctgtcagaaaataccatccaagtcaatatctttacttttgttcatcagacgttccggaaagaggtcctcaggtaggtttagtatctcaattgtctgtcttgagttccattacaaatatactaacgtctgagtatttggatttggaaaagaaaatttgtgagtatatcagatcatattataaagatgatataagttactttgaaacaggatttccaatcactatagaaaatgctctagtcgcatctcttaatccaaatatgatatgtgattttgtaactgactttagacgtagaaaacggatgggattcttcggtaacttggaggtaggtattactttagttagggatcacatgaatgaaattcgcattaatattggagcgggaagattagtcagaccattcttggttgtggataacggagagctcatgatggatgtgtgtccggagttagaaagcagattagacgacatgacattctctgacattcagaaagagtttccgcatgtcatcgaaatggtagatatagaacaatttacttttagtaacgtatgtgaatcggttcaaaaatttagaatgatgtcaaaggatgaaagaaagcaatacgatttatgtgactttcctgccgaatttagagatggatatgtagcatcttcactagtgggaatcaatcacaattctggacccagagctattcttggatgtgctcaagctaaacaagctatctcttgtctgagttcggatatacgaaataaaatagacaatggaattcatttgatgtatccagagaggccaatcgtgattagtaaggctttagaaacttcaaagattgcggctaattgcttcggccaacatgttactatagcattaatgtcgtacaaaggtatcaatcaagaggatggaattatcatcaaaaaacaatttattcagagaggcggtctcgatattgttacagccaagaaacatcaagtagaaattccattggaaaactttaataacaaagaaagagataggtctaacgcctattcaaaattagaaagtaatggattagttagactgaatgctttcttggaatccggagacgctatggcacgaaatatctcatcaagaactcttgaagatgattttgctagagataatcagattagcttcgatgtttccgagaaatataccgatatgtacaaatctcgcgttgaacgagtacaagtagaacttactgacaaagttaaggtacgagtattaaccatgaaagaaagaagacccattctaggagacaaatttaccactagaacgagtcaaaagggaacagtcgcgtatgtcgcggatgaaacggaacttccatacgacgaaaatggtatcacaccagatgtcattattaattctacatccatcttctctagaaaaactatatctatgttgatagaagttattttaacagccgcatattctgctaagccgtacaacaataagggagaaaaccgacctgtctgttttcctagtagtaacgaaacatccatcgatacatatatgcaattcgctaaacaatgttatgagcattcaaatccgaaattgtccgatgaagaattatcggataaaatcttttgtgaaaagattctctatgatcctgaaacggataagccttatgcatccaaagtattttttggaccaatttattacttgcgtctgaggcatttaactcaggacaaggcaaccgttagatgtagaggtaaaaagacgaagctcattagacaggcgaatgagggacgaaaacgtggaggaggtatcaagttcggagaaatggagagagactgtttaatagcgcatggtgcagccaatactattacagaagttttgaaagattcggaagaagattatcaagatgtgtatgtttgtgaaaattgtggagacatagcagcacaaatcaagggtattaatacatgtcttagatgttcaaaacttaatctctctcctctcttaacaaaaattgataccacgcacgtatctaaagtatttcttactcaaatgaacgccagaggcgtaaaagtcaaattagatttcgaacgaaggcctccttcgttttataaaccattagataaagttgatctcaagccgtcttttctggtgtaatattctagtttggtagtagatacatatcaatatcatcaaattcgagatccgaattataaaatgggcgtggattgttaactatagaatcggacgtctgatattcgaaaatctgtggagtttcaggttttggtggaggtgtaactgctacttgggatactgaagtctgatattcagaaagctgtggatgttctggttcggcatccaccgatggtgtcacatcactaatcggttcggtaacgtctgtggatggaggtgctacttctacagaacctgtagcctcagttgtcaacggagatacatttttaatgcgagaaaatgtataatttggtaatggtttcttatgtggatctgaagaagaggtaagatatctactagaaagataccgatcacgttctagttctcttttgtagaacttaactttttctttctccgcatctagttgatattccaacctcttcacgttactacgttcagattccaattcacgttcgcatgggttacctccgcagtttttacgagcgatttcacgttcagccttcatgcgtctctccctctctctatcgagtttatcagagcagtctttctgaaggcgatcgaactccataaatttctccaacgctttgattgtttccatagatttccgaagttcagcttttaggactgtgattctttttctttcgaattcacagctggatgtacaaccgtttccattaccgccatctctaagtttcttttctagatcggcaacatttcatccccatgccttttacattcctcgagtctactgtcgtcgaaatatcgttccagctccttttcgacatcaataactttagcacgttgtctctcaagctctcttttgtagttatctgattccctggcacgtttaagatcttcatgcaattgagtcagctcttaacttcctctcttgcttcttcgtcatagtacgcgcaatcactgtgagatccattgttaccacgtctacactcggcgagctcgcgtttaagagattcaatttcccgtttgtattggtccatgtttccattgctaccaccattagatttacaggctgctagttgtcgttcgagatcagaaatacgggttttcttggaattgatttcgtcgatgtacttggcatcgaaacacttattaagttctttttccaattctacgattttatttctttcgcgagtcaattccctcctgtagtaactatctgttttgtcagattcacgctctctacgtagactttcttgcaagttactaatttgttccctagcacgtccgagtttagttttatatgctgaatagagttctgattcatcctttgagcagatctctagcgatcgtttaagattcctaattctagtctttagcctatttacctcctcagaagatgttccgttaccgttgcgtttacactcgttaagctgtctatcaagatccatgattctatctctaagacgttgcatctctctttccatatcagcattgctttcattattacgtctgcagtcactcaactgtctttcaatatctgagattctatctctaagacgtcgcatctctctctgtttcggcattggtttcattattacgtctacagtcgttcaactgtctttcaagatctgatattctagattggagtctgctaatctctgtagcattttcacggcattcactcagttgtctttcaagatctgaaattttagattggagtctgctaatctctgtaagatttcctcctccgctctcgatgcagtcggtcaacttattctctagttctctaatacgcgaacgcagtgcatcaacttcttgcgtgtcttcctggttgcgtgtacattcatcgagtctagattcgagatctctaacgcgtcgtcgttcttcctcaagttctctgcgtactacagaaagcgtgtccttatcttgttgatatttagcaatttctgattctagagtactgattttgcttacgtagttactaatatttgtcttggccttatcaagatcctccttgtatttgtcgcattccttgatatccctacgaagtctggacagttcccattcgacattacgacgtttatcgatttcagctcggagatcgtcatcgcgttgttttagccacatacgactgagttcaagttctcgttgacaagatccatctacttttccattcctaatagtatccagttccttttctagttctgaacgcatttctcgttccctatcaagcgattctctcaattctcggatagtcttcttatcaatttctaataaatctgaaccatcatctgtcccattttgaatatccctgtgttctttgatctcttttgtaagtcggtcgattctttcggttttataaacagaatccctttccaaagtcctaatcttactgagtttatcactaagttctgcattcaattcggtgagttttctcttggcttcttccaactctgttttaaactctccactatttccgcattcttcctcgcatttatctaaccattcaattagtttattaataactagttggtaatcagcgattcctatagccgttcttgtaattgtgggaacataattaggatcttctaatggattgtatggcttgatagcatcatctttatcattattagggggatggacaaccttaattggttggtcctcatctcctccagtagcgtgtggttcttcaataccagtgttagtaataggcttaggcaaatgcttgtcgtacgcgggcacttcctcatccatcaagtatttataatcgggttctacttcagaatattcttttctaagagacgcgacttcgggagttagtagaagaactctgtttctgtatctatcaacgctggaatcaatactcaagttaaggatagcgaatacctcatcgtcatcatccgtatcttctgaaacaccatcatatgacatttcatgaagtctaacgtattgataaatagaatcagatttagtattaaacagatccttaacctttttagtaaacgcatatgtatattttagatctccagatttcataatatgatcacatgccttaaatgtcagtgcttccatgatataatctggaacactaatgggtgacgaaaaagatacagcaccatatgctacgttgataaataaatctgaaccactaagtagataatgattaatgttaagaaagaggaaatattcagtgtataggtatgtcttggcgtcatatcttgtactaaacacgctaaacagtttgttaatgtgatcaatttccaatagattaattagagcagcgggaataccaacaaacatattaccacatccgtattttctatgaatatcacatatcatgttaaaaaatcttgatagaagagcgaatatctcgtctgacttaatgagtcgtagttcagcagcaacataagtcataactgtaaatagaacatactttcctgtagtgttgattctagactccacatcaacaccattattaaaaatagttttatatacatctttaatctgctctccgttaatcgtcgaacgttctagtatacggaaacactttgatttcttatctgtagttaatgacttagtgatatcacgaagaatattacgaattacatttcttgtttttcttgagagacctgattcagaactcaactcatcgttccatagtttttctacctcagtggcgaaatctttggagtgcttggtacatttttcaataaggttcgtgacctccatttattataaaaaatttattcaaaacttaactacaatcgggtaattataaaatcgtagatctcccatgtggcggaatactaccatctatcgcatgtggatggacagtaggtaatggccatgggaacagtaatgtttgcatatttatctttcttgccagtattactgcatattgtcccaatgtttcgatgtgatgttctaacctatcaactgccgctgtatcacaacaatagtgtccgatgaaattaagattatgatccaatgtgtttaatatatgattatcaagtcttatacgatccgcgtcttttttgacaggatcaggttcttctacaggaagaagtttcggcctcttatgatattcatgtctgggaaacggtggtctagggtgaggctccggtatcggagtgggttttggattataatcatcatcgtctatgacatcatcttcgacttcgatatttattttgctatcttgatgatgtcctgtatcagttgcattttcagcactcgactgaatattagcgcattcattgtctattattaccatatttctaaacccaaaatgtatgtgttgaacatcagtactatcgttgatgagtcttatagcatgaattcgcttatcgttatcgggtttatcttctgtcaccttagcaattccttttttattaaactctacataatcatatccatttctattgtttgttctaatataaacgagtatagcatcattgctaaatttttcaatagtatcaaaaacagaatatcctaaaccatataatatatattcaggaacactcaaactaaatgtccaggattctcctaaatacgtaaactttaatagtgcgaaatcattcaaaaatctaccacttatagatagatagtacataaatgcgtatagtagtctacctatctctttattatgaaaaccggcattacgatcatatatgtcgtgatatacctgtgatccgtttacgttaaaccataaatacatgggtgatcctataaacatgaatttatttctaattctcagagctatagttaattgaccgtgtaatatttgcttacatgcatacttgatacgcttattaataagatttttatcattgctcgttatttcagaatcgtatatataaggagtaccatcgtgattcttaccagatattatacaaaatactatatataaaatatattgacccacgttagtaatcatataaatgtttaacgttttaaattttgtattcaatgatccattatcatacgctatcatggtcttgtaatattcattctttaaaatataatattgtgttagccattgcattggagctcctaatggagattttctattctcatccattttaggataggctttcataaagtccctaataacttcgtgaataatgtttctatgttttctactgatgcatgtatttgcttcgatttttttatcccatgtttcatctatcatagatttaaacgcagtaatgctcgcaacattaacatcttgaaccgttggtacaattccgttccataaatttataatgttcgccatttatataactcattttttgaatatacttttaattaacaaaagagttaagttactcatatggacgccgtccagtctgaacatcaatctttttagccagagatatcatagccgctcttagagtttcagcgtgattttccaacctaaatagaacttcatcgttgcgtttacaacacttttctatttgttcaaactttgttgttacattagtaatctttttttccaaattagttagccgttgtttgagagtttcctcattgtcgtcttcatcggctttaacaattgcttcgcgtttagcctctggctttttagcagcctttgtagaaaaaaattcagttgctggaattgcaagatcgtcatctccggggaaaagagttccgtccatttaaagtacagattttagaaactgacactctgcgttatttatatttggtacaacacatggattataaatattgatgttaataacatcagaaaatgtaaagtctatacattgttgcatcgtgttaaattttctaatggatctagtattattgggtccaacttctgcctgaaatccaaatatggaagcggatacaaaaccgtttcctggataaaccacacatctccacttttgctttacatcagaaattgtgtcgttgacatcttgaactctcctatctaatgccggtgttccacctatagattttgaatattcgaatgctgcatgagtagcattaaattccttaatattgccataattttcatatattgagtaaccctggataaaaagtaaacacaccgcagccgtcgctaccacaataaaaaaaattgatagagagttcatttataatctattagaagctgacaaaatttttttacacgcatcagacaatgctttaataaatagttcaacatctacttttgtcatatcgaaccgatggtatgattctaacctagaattacatccgaaaaagttgactatgttcatagtcattaagtcattaacaaacaacattccagactctggattataagacgatactgtttcgtcacaattacctaccttaatcatgtgattatgaatattggctattagagcaccttctaagaaatctataatatctttgaaacacgatttaaaatcaaaccacgaatatacttctacgaagaaagttagtttacccataggagaaataactataaatggagatctaaatacaaaatccggatctatgatagttttaacattattatattctctattaaatacctccacatctaaaaatgttaattttgaaactatgtcttcgtttattaccgtacctgaactaaacgctataagctctattgtttgagaactctttaaacgatattcttgaaatacatgtaacaaagtttcctttaactcggtcggtttatctaccatagttacagaatttgtatccttatctataatataataatcaaaatcgtataaagttatataattatcgcgttcagattgggatcttttcaaatagactaaaaaccccatttctctagtaagtatcttatgtatatgtttgtaaaatatcttcatggtgggaatatgctctaccgcagttagccattcctcattgacagcggtagatgtattagacaaaactattccaatgtttaacaagggccattttacgagattattaaatccttgtttgataaatgtagccaatgagggttcgagttcaacgacgattgaattctcttcccgcggatgctgcatgatgaacgacgggatgttgttcgattgatttggaattctttttcgactttttgtttatattaaatattttaaaatttatagcggatagcaattcatgtaccacggataatgtagacgcgtattgcgcatcgatatctttattattagataaatttatcaataaatgtgagaagtttgcctcgttaaggtcttccatttaaatattatataaacatttgtgtttgtaacttattcgtcttttatggaatagttttttactagtaaagctgcaattacacactttgtccgtaaaacataaatataaacaccagcttttatcaatcgttccaaaaagtcgacggcggacatttttaacatggcatctattttaaatacacttaggtttttggaaaaaacatcattttataattgtaacgattcaataactaaagaaaagattaagattaaacataagggaatgtcatttgtattttataagccaaagcattctaccgttgttaaatacttgtctggaggaggtatatatcatgatgatttggttgtattggggaaggtaacaattaataatctaaagatgatgctattttacatggatttatcatatcatggagtgacaagtagtggagcaatttacaaattgggatcgtctatcgatagactttctctaaataggactattgttacaaaagttaataattatgatgatacattttttgacgacgatgattgatcgctattgcacaattttgtttttgtactttctaatatagtgtttaggttctttttcatatgagaatattgatttactaaaatatctatgtttaacttttgttctatgacgtccttatcggcggtatcggtacatatacgtaattcaccttcacaaaatacggagtcttcgataataatagccaatcgattattggatctagctgtctgtatcatattcaacatgtttaatatatcctttcgtttcccctttacaggcatcgatcgtagcatattttccgcgtctgatatggaaatgttaaaactacaaaaatgcgtaatgttagcccgtcctaatattggtacgtgtctataagtttggcatagtagaataatagacgtgtttaaatgccttccaaagtttaagaattctattagagtattgcattttgatagtttatcgcctacatcatcaaaaataagtaaaaagtgtgctgattttttatgattttgtgcgacagcaatacatttttctatgttacttttagttcgtatcagattatattctagagattcctgactactaacgaaattaatatgatttggccaaatgtatccatcataatctgggttataaacgggtgtaaacaagaatatatgtttatattttttaactagtgtagaaaacagagatagtaaatagatagtttttccagatccagatcctcctgttaaaaccattctaaacggcatttttaataaattttctcttgaaaattgtttttcttggaaacaattcataattatatttacagttactaaattaatttgataataaatcaaaatatggaaaactaaggttgttagtagggaggagaacaaagaaggcacatcgtgatataaataacatttattatcatgatgacaccagaaaacgacgaagagcagacatctgtgttctccgctactgtttacggagacaaaattcagggaaagaataaacgcaaacgcgtgattggtctatgtattagaatatctatggttatttcactactatctatgattaccatgtccgcgtttctcatagtgcgcctaaatcaatgcatgtctgctaacgaggctgctattactgacgccgctgttgccgttgctgctgcatcatctactcatagaaaggttgcgtctagcactacacaatatgatcacaaagaaagctgtaatggtttatattaccagggttcttgttatatattacattcagactaccagttattctcggatgctaaagcaaattgcactgcggaatcatcaacactacccaataaatccgatgtcttgactacctggctcattgattatgttgaggatacatggggatctgatggtaatccaattacaaaaactacatccgattatcaagattctgatgtatcacaagaagttagaaagtatttttgtgttaaaacaatgaactaatatttatttttgtacattaataaatgaaatcgcttaatagacaaactgtaagtaggtttaagaagttgtcggtgccggccgctataatgatgatactctcaaccattattagtggcataggaacatttctgcattacaaagaagaactgatgcctagtgcttgcgccaatggatggatacaatacgataaacattgttatttagatactaacattaaaatgtctacagataatgcggtttatcagtgtcgtaaattacgagctagattgcctagacctgatactagacatctgagagtattgtttagtattttttataaagattattgggtaagtttaaaaaagaccaatgataaatggttagatattaataatgataaagatatagatattagtaaattaacaaattttaaacaactaaacagtacgacggatgctgaagcgtgttatatatacaagtctggaaaactggttaaaacagtatgtaaaagtactcaatctgtactatgtgttaaaaaattctacaagtgacaacaaaaaatgaattaataataagtcgttaacgtacgccgccatggacgccgcgtttgttattactccaatgggtgtgttgactataacagatacattgtatgatgatctcgatatctcaatcatggactttataggaccatacattataggtaacataaaaactgtccaaatagatgtacgggatataaaatattccgacatgcaaaaatgctactttagctataagggtaaaatagttcctcaggattctaatgatttggctagattcaacatttatagcatttgtgccgcatacagatcaaaaaataccatcatcatagcatgcgactatgatatcatgttagatatagaagataaacatcagccattttatctattcccatctattgatgtttttaacgctacaatcatagaagcgtataacctgtatacagctggagattatcatctaatcatcaatccttcagataatctgaaaatgaaattgtcgtttaattcttcattctgcatatcagacggcaatggatggatcataattgatgggaaatgcaatagtaattttttatcataaaagttgtaaagtaaataataaaacaataaatattgaactagtagtacgtatattgagcaatcagaaatgatgctggtacctcttatcacggtgaccgtagttgcgggaacaatattagtatgttatatattatatatttgtaggaaaaagatacgtactgtctataatgacaataaaattatcatgacaaaattaaaaaagataaagagttctaattccagcaaatctagtaaatcaactgatagcgaatcagactgggaggatcactgtagtgctatggaacaaaacaatgacgtagataatatttctaggaatgagatattggacgatgatagcttcgctggtagtttaatatgggataacgaatccaatgttatggcgcctagcacagaacacatttacgatagtgttgctggaagcacgctgctaataaataatgatcgtaatgaacagactatttatcagaacactacagtagtaattaatgaaacggagactgttgaagtacttaatgaagataccaaacagaatcctaactattcatccaatcctttcgtaaattataataaaaccagtatttgtagcaagtcaaatccgtttattacagaacttaacaataaatttagtgagaataatccgtttagacgagcacatagcgatgattatcttaataagcaagaacaagatcatgaacacgatgatatagaatcatcggtcgtatcattggtgtgattagtttcctttttataaaattgaagtaatatttagtattattgctgccgtcacgttgtacaaatggagatattccctgtattcggcatttctaaaattagcaattttattgctaataatgactgtagatattatatagatacagaacatcaaaaaattatatctgatgagatcaatagacagatggatgaaacggtacttcttaccaacatcttaagcgtagaagttgtaaatgacaatgagatgtaccatcttattcctcatagattatcgacgattatactctgtattagttctgtcggaggatgtgttatctctatagataatgacatcaatggcaaaaatattctaacctttcccattgatcatgctgtaatcatatccccactgagtaaatgtgtcgtagttagcaagggtcctacaaccatattggttgttaaagcggatatacctagcaaacgattggtaacatcgtttacaaacgacatactatatgtaaacaatctgtcactgattaattatttgccgttgtctgtattcattattagacgagtcaccgactatttggatagacacatatgcgatcagatatttgctaataataagtggtattcccttataaccatcgacgataagcaatatcctattccatcaaactgtataggtatgtcctctgccaagtacataaattctagcatcgagcaagatactttaatccatgtttgtaacctcgagcatccgttcgactcagtatacaaaaaaatgcagtcgtacaattctctacctatcaaggaacaaatattgtacggtagaattgataatataaatatgagcattagtatttctgtggattaatagatttctagtatggggatcattaatcatctctaatctctaaatacctcataaaacgaaaaaaaagctattatcaaatactgtacggaatggattcattctcttctctttttatgaaactctgttgtatatctactgataaaactggaagcaaaaaatctgatagaaagaataagaataagatcaaggattatatggaacacgattattataaaataacaatagttcctggttcctcttccacgtctactagctcgtggtattatacacatgcctagtaatagtctctttgcgttgacggaaagcagactagaaataacaggctaaaatgttcagacaccataatagttcccaacccagataataacagagttccatcaacacattcctttaaactcaatcccaaacccaaaaccgttaaaatgtatccggccaattgatagtagataatgaggtgtacagcgcatgataatttacacagtaaccaaaatgaaaatactttagtaattataagaaatatagacggtaatgtcatcatcaacaatccgataatatgcctgagagtaaacattgacggataaaacaaaaatgctccgcataactctatcatggcaataacacaaccaaatacttgtaagattcctaaattagtagaaaatacaacgaatatcgatgtataagtgatctcgagaaataataagaataaagtaatgcccgtaaagataaacatcaacattgtttggtaatcattaaaccaattagtatgaagttgaactaatttcacagtagattttattccagtgttatcctcgcatgtataagtacctggtaagatatctttatattccataatcaatgagacatcactatctgataacgaatgaagtctagcactagtatgccatttacttaatattgtcgtcttggaagttttattataagttaaaatatcatggttatccaatttccatctaatatactttgtcggattatctatagtacacggaataatgatggtatcattacatgctgtatactctatggtctttgtagttgttataacaaccaacgtatagaggtatatcaacgatattctaactcttgacattttttatttatttaaaatgatacctttgttatttattttattctattttgctaacggtattgaatggcataagtttgaaacgagtgaagaaataatttctacttacttattagacgacgtattatacacgggtgttaatggggcggtatacacattttcaaataataaactaaacaaaactggtttaactaataataattatataacaacatctataaaagtagaggatgcggataaggatacattagtatgcggaaccaataacggaaatcccaaatgttggaaaatagacggttcagacgacccaaaacatagaggtagaggatacgctccttatcaaaatagcaaagtaacgataatcagtcacaacggatgtgtactatctgacataaacatatcaaaagaaggaattaaacgatggagaagatttgacggaccatgtggttatgatttattcacggcggataacgtaattccaaaagatggtttacgaggagcattcgtcgataaagacggtacttatgacaaagtttacattcttttcactgatactatcggctcaaagagaattgtcaaaattccgtatatagcacaaatgtgcctaaacgacgaaggtggtccatcatcattgtctagtcatagatggtcgacgtttctcaaagtcgaattagaatgtgatatcgacggaagaagttatagacaaattattcattctagaactataaaaacagataatgatacgatactatatgtattcttcgatagtccttattccaagtccgcattatgtacctattctatgaataccattaaacaatctttttctacgtcaaaattggaaggatatacaaagcaattgccgtctccagctcctggtatatgtttaccagctggaaaagttgttccacataccacgtttgaagtcatagaacaatataatgtactagatgatattataaagcctttatctaaccaacctatcttcgaaggaccgtctggtgttaaatggttcgatataaaggagaaggaaaatgaacatcgggaatatagaatatacttcataaaagaaaattctatatattcgttcgatacaaaatctaaacaaactcgtagctcgcaagtcgatgcgcgactattttcagtaatggtaactgcgaaaccgttatttatagcagatatagggataggagtaggaatgccacaaatgaaaaaaatacttaaaatgtaatcttaatcgagtacaccacacgacaatgaacaaacataagacagattatgctggttatgcttgctgcgtaatatgcggtctaattgtcggaattatttttacagcgacactattaaaagttgtagaacgtaaattagttcatacaccattaatagataaaacgataaaagatgcatatattagagaagattgtcctactgactggataagctataataataaatgtatccatttatctactgatcgaaaaacctgggaggaaggacgtaatgcatgcaaagctctaaattcaaattcggatctaattaagatagagactccaaacgagttaagttttttaagaagccttagacgaggctattgggtaggagaatccgaaatattaaaccagacaaccccatataattttatagctaagaatgccacgaagaatggaactaaaaaacggaaatatatttgtagcacaacgaatactcccaaactgcattcgtgttacactatataacaattacactacatttttatcataccactacttcggttagatgttttagaaaaaaataaatatcgccgtaccgttcttgtttttataaaaataacaattaacaattatcaaattttttctttaatattttacgtggttgaccattcttggtggtaaaataatctcttagtgttggaatggaatgctgtttaatgtttccacactcatcgtatattttgacgtatgtagtcacatcgtttacgcaatagtcagactgtagttctatcatgcttcctacatcagaaggaggaacagttttaaagtctcttggttttaatctattaccgttagttttcatgaaatcctttgttttatccacttcacattttaaataaatgtccactatacattcttttgttaattttactagatcgtcatgggtcatagaatttataggttccgtagtccatggatccaaactagcaaacttcgcgtatacggtatcgcgattagtgtatacaccaactgtatgaaaattaagaaaacagtttaataaatcaacagaaatatttaatcctccgtttgatacagatgcgccatatttatggatttcggattcacacgttgtttgtctgaggtgttcgtctagtgttgcttctacgtaaacttcgattcccatatattctttattgtcagaatcgcataccgatttatcatcatacactgtttgaaaactaaatggtatacacatcaaaataataaataataacgagtacattctgcaatattgttatcgtaattggaaaaatagtgttcgagtgagttggattatgtgagtattggattgtatattttattttatattttgtaataagaataaaatgctaatgtcaagtttattccaatagatgtcttattaaaaacatatataataaataacaatggctgaatggcataaaattatcgaggatatctcaaaaaataataagttcgaggatgccgccatcgttgattacaagactacaaagaatgttctagctgctattcctaacagaacatttgccaagattaatccgggtgaaattattcctctcatcactaatcgtaatattctaaaacctcttattggtcagaaatattgtattgtatatactaactctctaatggatgagaacacgtatgctatggagttgcttactgggtacgcccctgtatctccgatcgttatagcgagaactcataccgcacttatatttttgatgggtaagccaacaacatccagacgtgacgtgtatagaacgtgtagagatcacgctacccgtgtacgtgcaactggtaattaaaataaaaagtaatattcatatgtagtgtcaattttaaatgatgatgatgaaatggataatatccatattgacgatgtcaataatgccggtattggcatacagttcatcgatttttagatttcattcagaggatgtggaattatgttatgggcatttgtattttgataggatctataatgtagtaaatataaaatataatccgcatattccatatagatataattttattaatcgcacgttaaccgtagatgaactagacgataatgtcttttttacacatggttattttttaaaacacaaatatggttcacttaatcctagtttgattgtctcattatcaggaaacttaaaatataatgatatacaatgctcagtaaatgtatcgtgtctcattaaaaatttggcaacgagtacatctactatattaacatctaaacataagacttattctctacatcggtccacgtgtattactataataggatacgattctattatatggtataaagatataaatgacaagtataatgacatctatgattttactgcaatatgtatgctaatagcgtctacattgatagtgaccatatacgtgtttaaaaaaataaaaatgaactcttaattatgctatgctattagaaatggataaaatcaaaattacggttgattcaaaaattggtaatgttgttaccatatcgtataacttggaaaagataactattgatgtcacacctaaaaagaaaaaagaaaaggatgtattattagcgcaatcagttgctgtcgaagaggcaaaagatgtcaaggtagaagaaaaaaatattatcgatattgaagatgacgatgatatggatgtagaaagcgcataatacgatctataaaaataagtatataaatactttttatttactgtactcttactgtgtagtggtgataccctactcgattatttttttaaaaaaaaaatacttattctgattcttctaaccatttccgtgttcgttcgaatgccacatcgacgtcaaagataggggagtagttaaaatctagttctgcattgttggtacacaccttaaatgtagtgttggatatcttcaacgtatagttgttgagtagtgatggttttctaaatagaattctcttcatatcattcttgcacgcgtacatttttagcatccatcttggaaaccttaactttcgaggttattggttgtggatcttctacaatatctatgactctgatttcttgaacatcatctgcactaattaacagttttactatatacctgcctagaaatccggcaccaccagtaaccgcgtacacggccattgctgccactcataatatcagactacttattctattttactaaataatggctgtttgtataatagaccacgataatatcagaggagttatttactttgaaccagtccatggaaaagataaagttttaggatcagttattggattaaaatccggaacgtatagtttgataattcatcgttacggagatattagtcaaggatgtgattccataggcagtccagaaatatttatcggtaacatctttgtaaacagatatggtgtagcatatgtttatttagatacagatgtaaatatatctacaattattggaaaggcgttatctatttcaaaaaatgatcagagattagcgtgtggagttattggtatttcttacataaatgaaaagataatacattttcttacaattaacgagaatggcgtttgatatatcagttaatgcgtctaaaacaataaatgcattagtttacttttctactcagcaaaataaattagtcatacgtaatgaagttaatgatacacactacactgtcgaatttgatagggacaaagtagttgacacgtttatttcatataatagacataatgacaccatagagataagaggggtgcttccagaggaaactaatattggttgcgcggttaatacgccggttagtatgacttacttgtataataagtatagttttaaactgattttagcagaatatataagacacagaaatactatatccggcaatatttattcggcattgatgacactagatgatttggctattaaacagtatggagacattgatctattatttaatgagaaacttaaagtagactccgattcgggactatttgactttgtcaactttgtaaaggatatgatatgttgtgattctagaatagtagtagctctatctagtctagtatctaaacattgggaattgacaaataaaaagtataggtgtatggcattagccgaacatatatctgatagtattccaatatctgagctatctagactacgatacaatctatgtaagtatctacgcggacacactgagagcatagaggataaatttgattattttgaagacgatgattcgtctacatgttctgccgtaaccgacagggaaacggatgtataattttttttatagcgtgaaggatatgataaaaaatataattgttgtatttatcccattccaatcaccttatatgattctgtaacacaataaaggagtcttatagatgtatagaggtcagatactggtttgataaactgtttattccacataagtatgtttgactttatggttagacccgcatactttaacaaatcactgaaaattggagttaggtattgacctctcagaatcagttgccgttctggaacattaaatgtattttttatgatatactccaacgcatttatgtgggcatacaacaagtcattactaatggaatattccaagagttttagttgtctagtatttaacaagagaagagatttcaacagactgtttatgaactcgaatgccgcctcattgtcgcttatattgatgatgtcgaattctcccaatatcatcaccgatgagtagctcatcttgttatcgggatccaagttttctaaagatgtcattaaaccctcgatcatgaatggatttatcatcatcgtttttatgttggacatgagcttagtccgtttgtccacatctatagaagatgatttctgaattatttcatatatctctctctttaactccaggaacttgtcaggatggtctactttaatatgttctcgtctaagagatgaaaatctttggatggttgcacgcgacttttctctaaaggatgacgttgcccaagatcctctcttaaatgaatccatcttatccttggacaagatggacagtctattttccttagatggtttaatatttttgttacccatgatctataaaggtagacctaatcgtctcggatgaccatatatttattttcagttttattatacgcataaattgtaaaaaatatgttaggtttacaaaaatgtctcgtggggcattaatcgtttttgaaggattggacaaatctggaaaaacaacacaatgtatgaacatcatggaatctataccggcaaacacgataaaatatcttaactttcctcagagatccactgtcactggaaaaatgatagatgactatctaactcgtaaaaaaacctataatgatcatatagttaatctattattttgtgcaaatagatgggagtttgcatcttttatacaagaacaactagaacagggaattactttaatagttgatagatacgcattttctggagtagcgtatgccgccgctaaaggcgcgtcaatgactctcagtaagagttatgaatctggattgcctaaacccgacttagttatattcttggaatctggtagcaaagaaattaatagaaacgtcggcgaggaaatttatgaagatgttacattccaacaaaaggtattacaagaatataaaaaaatgattgaagaaggagatattcattggcaaattatttcttctgaattcgaggaagatgtaaagaaggagttgattaagaatatagttatagaggctatacacacggttactggaccagtggggcaactgtggatgtaatagtgaaattacattttttataaatagatgttagtacagtgttataaatggatgaagcatattactctggcaacttggaatcagtactcggatacgtgtccgatatgcataccgaactcgcatcaatatctcaattagttattgccaagatagaaactatagataatgatatattaaacaaggacattgtaaattttatcatgtgtagatcaaacttggataatccatttatctctttcctagatactgtatatactattaaaaataactagttataagtttgaatccgtcaattttgattccaaaattgaatggactggggatggtctatacaatatatcccttaaaaattatggcatcaagacgtggcaaacaatgtatacaaatgtaccagaaggaacatacgacatatccgcatttccaaagaatgatttcgtatctttctgggttaaatttgaacaaggcgattataaagtggaagagtattgtacgggactatgcgtcgaagtaaaaattggaccaccgactgtaacattaactgaatacgacgaccatatcaatttgtacatcgagcatccgtatgctactagaggtagcaaaaagattcctatttacaaacgcggtgacatgtgtgatatctacttgttgtatacggctaacttcacattcggagattctaaagaaccagtaccatatgatatcgatgactacgattgcacgtctacaggttgcagcatagactttgtcacaacagaaaaagtgtgcgtgacagcacagggagccacagaagggtttctcgaaaaaattactccatggagttcgaaagtatgtctgacacctaaaaagagtgtatatacatgcgcaattagatccaaagaagatgttcccaatttcaaggacaaaatggccagagttatcaagagaaaatttaatacacagtctcaatcttatttaactaaatttctcggtagcacatcaaatgatgttaccacttttcttagcatgcttaacttgactaaatattcataattattttttattaatgatacaaaaacgaaataaaactgcatattatacactggttaacgcccttataggctctaaccattttcaagatgaggtccctgattatagtccttctgttcccctctatcatctactccatgtctattagacgatgtgagaagactgaagaggaaacatggggattgaaaatagggttgtgtataattgccaaagatttctatcccgaaagaactgattgcagtgttcatctcccaactgcaagtgaaggattgataactgaaggcaatggattcagggatatacgaaacaccgataaattataaaaaaagcaatgtgtccgctgtttccgttaataatactattttcgtaactggcggattattcataaataactctaatagcacgatcgtggacatttataaagacaaacaatggtcgattatagaaatggctagggtatatcacggcatcgactcgacatttggaatgttatattttgccggaggtctatccgttaccgaacaatatggtaatttagagaaaaacaacgagatatcttgttacaatcctagaacgaataagtggtttgatatttcatatactatttataagatatccatatcatcattgtgtaaactaaataacgtcttctatgtatttagtaaggacattggatatgtggaaaagtatgatggtgcatggaagttagtacatgatcgtctccccgctataaaggcattatcaacttctccttattgattgaaaatgaaaatataaatagtttttatgtatagcagtattaccctatagttttattgcttactactaacatggatacagatgttacaaatgtagaagatatcataaatgaaatagatagagagaaagaagaaatactaaaaaatgtagaaattgaaaataataaaaacattaacaagaatcatcccaatgaatatattagagaagcactcgttattaataccagtagtaatagtgattccattgataaagaagttatagaatgtatcagtcacgatgtaggaatatagatcatatctactaatttttataatcgatacaaaacataaaaaacaactcgttattacatagcaggcatggaatccttcaagtattgttttgataacgatggcaagaaatggattatcggaaatactttatattctggtaattcaatactctataaggtcagaaaaaatttcactagttcgttctacaattacgtaatgaagatagatcacaaatcacacaagccattgttgtctgaaatacgattctatatatctgtattggatcctttgactatcgacaactggacacgggaacgtggtataaagtatttggctattccagatctgtatggaattggagaaaccgatgattatatgttcttcgttataaagaattcgggaagagtattcgccccaaaggatactgaatcagtcttcgaagcatgcgtcactatgataaacacgttagagtttatacactctcgaggatttacccatggaaaaatagaaccgaggaatatactgattagaaataaacgtctttcactaattgactattctagaactaacaaactatacaagagtggaaactcacatatagattacaacgaggacatgataacttcaggaaatatcaattatatgtgtgtagacaatcatcttggagcaacagtttcaagacgaggagatttagaaatgttgggatattgcatgatagaatggttcggtggcaaacttccatggaaaaacgaaagtagtataaaagtaataaaacaaaaaaaagaatataaaaaatttatagctactttctttgaggactgttttcctgaaggaaatgaacctctggaattagttagatatatagaattagtatacacgttagattattctcaaactcctaattatgacagactacgtaaactgtttatacaagattgaaattatattcttttttttatagagtgtggtagtgttacggatatctaatattaatattagactatctctatcgcgctacacgaccaatatcgattactatggatatcttctatgaaaggagagaatgtatttatttctccagcgtcaatctcgtcagtattgacaatactgtattatggagctaatggatccactgctgaacagctatcaaaatatgtagaaacggaggagaacacggataaggttagcgctcagaatatctcattcaaatccatgaataaagtatatgggcgatattctgccgtgtttaaagattcctttttgagaaaaattggcgataagtttcaaactgttgacttcactgattgtcgcactatagatgcaatcaacaagtgtgtagatatctttactgaggggaaaatcaatccactattggatgaaccattgtctcctagcaattagtgccgtatactttaaagcaaaatggttgacgccattcgaaaaggaatttaccagtgattatcccttttacgtatctccgacggaaatggtagacgtaagtatgatgtctatgtacggcaaggcatttaatcacgcatctgtaaaagaatcattcggcaacttttcaatcatagaactgccatatgttggagatactagtatgatggtcattcttccagacaagattgatggattagaatccatagaacaaaatctaacagatacaaattttaagaaatggtgtgactttatggatgctatgtttatagatgttcacattcccaagtttaaggtaacaggctcgtataatctggtggatactctagtaaagtcaggactgacagaggtgttcggttcaactggagattatagcaatatgtgtaatttagatgtgagtgtcgacgctatgatccacaaaacgtatatagatgtcaatgaagagtatacagaagcagctgcagcaacttctgtactagtggcagactgtgcatcaacaattacaaatgagttctgtgcagatcatccgttcatctatgtgattaggcatgttgatggaaaaattcttttcgttggtagatattgctctccgacaactaattgttaaccattttttttaaaaaaaacaatgggtgatggatacacttgatggtataatgatgaatgaacgcgatgtttctgtaagcgttggcaccggaatactattcatggaaatgtttttccgttacaataaaaatagtatcaacaatcaactaatgtatgatataattaatagcgtatctataagtgtagctaattatagatatagaagctgcttttaacgacgatggtatatacatccgtagaaatatgattaacaagttgtacggatacgcatctctaactactattggcacgatcgctggaggtgtttgttattatctgttgatgcatctagttagtttgtataaataattatttcaatatactagttaaaattttaagattttaaatgtataaaaaactaataacgtttttatttgtaataggtgcattagcatcctattcgaataatgagtacactccgtttaataaactgagtgtaaaactctatatagatggagtagataatatagaaaattcatatactgatgataataatgaattggtgttaaattttaaagagtacacaatttctattattacagagtcatgcgacgtcggatttgattccatagatatagatgttataaacgactataaaattattgatatgtataccattgactcgtctactattcaacgcagaggtcacacgtgtagaatatctaccaaattatcatgccattatgataagtacccttatattcacaaatatgatggtgatgagcgacaatattctattactgcagagggaaaatgctataaaggaataaaatatgaaataagtatgatcaacgatgatactctattgagaaaacatactcttaaaattggatctacttatatatttgatcgtcatggacatagtaatacatattattcaaaatatgatttttaaaaatttaaaatatattatcacttcagtgacagtagtcaaataacaaacaacaccatgagatatattataattctcgcagttttgttcattaatagtatacacgctaaaataactagttataagtttgaatccgtcaattttgattccaaaattgaatggactggggatggtctatacaatatatcccttaaaaattatggcatcaagacgtggcaaacaatgtatacaaatgtaccagaaggaacatacgacatatccgcatttccaaagaatgatttcgtatctttctgggttaaatttgaacaaggcgattataaagtggaagagtattgtacgggactatgcgtcgaagtaaaaattggaccaccgactgtaacattgactgaatacgacgaccatatcaatttgtacatcgagcatccgtatgctactagaggtagcaaaaagattcctatttacaaacgcggtgacatgtgtgatatctacttgttgtatacggctaacttcacattcggagattctaaagaaccagtaccatatgatatcgatgactacgattgcacgtctacaggttgcagcatagactttgtcacaacagaaaaagtgtgcgtgacagcacagggagccacagaagggtttctcgaaaaaattactccatggagttcgaaagtatgtctgacacctaaaaagagtgtatatacatgcgcaattagatccaaagaagatgttcccaatttcaaggacaaaatggccagagttatcaagagaaaatttaatacacagtctcaatcttatttaactaaatttctcggtagcacatcaaatgatgttaccacttttcttagcatgcttaacttgactaaatattcataactaatttttattaatgatacaaaaacgaaataaaactgcatattatacactggttaacgcccttataggctctaaccattttcaagatgaggtccctgattatagtccttctgttcccctccatgtctattagacgatgtgagaagactgaagaggaaacatggggattgaaaatagggttgtgtataattgccaaagatttttatcccgaaagaactgattgcagtgttcatctcccaactgcaagtgaaggattgataactgaaggcaatggattcagggatatacgaaacaccgataaattataaaaaaagcaatgtgtccgctgtttccgttaataatactattttcgtaactggcggattattcataaataactctaatagcacgatcgtggacatttataaagacaaacaatggtcgattatagaaatggctagggtatatcacggcatcgactcgacatttggaatgttatattttgccggaggtctatccgttaccgaacaatatggtaatttatagaaaaacaacgagatatcttgttacaatcctagaacgaataagtggtttgatatttcatatactatttataagatatccatatcatcattgtgtaaactaaataacgtcttctatgtatttagtaaggacattggatatgtggaaaagtatgatggtgcatggaagttagtacatgatcgtctccccgctataaaggcattatcaacttctccttattgattgaaaatgaaaatataaatagtttttatgtatagcagtattaccctatagttttattgcttactactaacatggatacagatgttacaaatgtagaagatatcataaatgaaatagatagagagaaagaagaaatactaaaaaatgtagaaattgaaaataataaaaacattaacaagaatcatcccaatgaatatattagagaagcactcgttattaataccagtagtaatagtgattccattgataaagaagttatagaatgtatcagtcacgatgtaggaatatagatcatatctactaatttttataatcgatacaaaacataaaaaacaactcgttattacatagcaggcatggaatccttcaagtattgttttgataacgatggcaagaaatggattatcggaaatactttatattctggtaattcaatactctataaggtcagaaaaaatttcactagttcgttctacaattacgtaatgaagatagatcacaaatcacacaagccattgttgtctgaaatacgattctatatatctgtattggatcctttgactatcgacaactggacacgggaacgtggtataaagtatttggctattccagatctgtatggaattggagaaaccgatggattatatgttcttcgttataaagaattcgggaagagtattcgccccaaaggatactgaatcagtcttcgaagcatgcgtcactatgataaacacgttagagtttatacactctcgaggatttacccatggaaaaatagaaccgaggaatataatattaaaacttaccacgtaaaacttaaaatttaaaatgatatttcattgacagatagatcacacattatgaactttcaaggacttgtgttaactgacaattgcaaaaatcaatgggtcgttggaccattaataggaaaaggtggatttggtagtatttatactactaatgacaataattatgtagtaaaaatagagcccaaagctaacggatcattatttaccgaacaggcattttatactagagtacttaaaccatccgttatcgaagaatggaaaaaatctcacaatataaagcacgtaggtcttatcacgtgcaaggcatttggtctatacaaatccattaatgtggaatatcgattcttggtaattaatagattaggtgcagatctagatgcggtgatcagagccaataataatagactaccaaaaaggtcggtgatgttgatcggaatcgaaatcttaaataccatacaatttatgcacgagcaaggatattctcacggagatattaaagcgagtaatatagtcttagatcaaatagataagaataaattatatctagtggattacggattggtttctaaattcatgtctaatggcgaacatgttccatttataagaaatccaaataaaatggataacggtactctagaatttacacctatagattcgcataaaggatacgttgtatctagacgtggagatctagaaacacttggatattgtatgattagatggttgggaggtatcttaccatggactaagatatctgaaacaaagaattgtgcattagtaagtgccacaaaacagaaatatgttaacaatactgcgactttgttaatgaccagtttgcaatatgcacctagagaattgctgcaatatattaccatggtaaactctttgacatattttgaggaacccaattacgacaagtttcggcacatattaatgcagggtgtatattattaagtgtggtgtttggtcgataaaaattaaaaaataacttaatttattattgatctcgtgtgtacaaccgaaatcatggcgatgttttacgcacacgctctcggtgggtacgacgagaatcttcatgcctttcctggaatatcatcgactgttgccaatgatgtcaggaaatattctgttgtgtcagtttataataacaagtatgacattgtaaaagacaaatatatgtggtgttacagtcaggtgaacaagagatatattggagcactgctgcctatgtttgagtgcaatgaatatctacaaattggaaatccgatccatgatcaagaaggaaatcaaatctctatcatcacatatcgccacaaaaactactatgctctaagcggaatcgggtacgagagtctagacttgtgtttggaaggagtagggattcatcatcacgtacttgaaacaggaaacgctgtatatggaaaagttcaacatgattattctactatcaaagagaaggccaaagaaatgagtgcacttagtccaggacctatcatcgattaccacgtctggataggagattgtatctgtcaagttactgctgtggacgtacatggaaaggaaattatgaaaatgagattcaaaaagggtgcggtgcttccgatcccaaatctggtaaaagttaaacttggggagaatgatacagaaaatctttcttctactatatcggcgacaccatcgaggtaaccacctctctggaagacagcgtgaataatgtactcatgaaacgtttggaaactatacgccatatgtggtctgttgtatatgatcattttgatattgtgaatggtaaagaatgctgttatgtgcatacgcatttgtctaatcaaaatcttataccgagtactgtaaaaacaaatttgtacatgaagactatgggatcatgcattcaaatggattccatggaagctctagagtatcttagcgaactgaaggaatcaggtggatggagtcccagaccagaaatgcaggaatttgaatatccagatggagtggaagacactgaatcaattgagagattggtagaggagttcttcaatagatcagaacttcaggctggtgaatcagtcaaatttggtaattctattaatgttaaacatacatctgtttcagctaagcaactaagaacacgtatacggcagcagcttccttctatactctcatcttttaccaacacaaagggtggatatttgttcattggagttgataataatacacacaaagtatttggattcacggtgggttacgactacctcagactgatagagaatgatatagaaaagcatatcaaaagactttgtgttgtgtatttctgtgagaagaaagaggacatcaagtacgcgtgtcgattcatcaaggtatataaacctggggatgaggctacctcgacatacgtgtgcgctatcaaagtggaaagatgctgttgtgctgtgtttgcagattggccagaatcatggtatatggatactaatggtatcaagaagtattctccagatgaatgggtgtcacatataaaattttaattaatgtaactatagagaacaaataataaggttgtaatatcatatagacaataactaacaattaattagtaactgttatctcttttttaattaaccaactaactatatacctattaatacatcgtaattatagttcttaacatctattaatcattaattcgcttctttaattttttataaactaacattgttaattgaaaagggataacatgttacagaatataaattatatatggatttttttaaaaaggaaatacttgactggagtatatatttatctcttcattatatagcacgcgtgttttccaatttttccacatcccatataatacaggattataatctcgttcgaacatacgagaaagtggataaaacaatagttgattttttatctaggttgccaaatttattccatattttagaatatggggaaaatattctacatatttattctatggatgatgctaatacgaatattataattttttttctagatagagtattaaatattaataagaacgggtcatttatacacaatctcgggttatcatcatccattaatataaaagaatatgtatatcaattagttaataatgatcatccagataataggataagactaatgcttgaaaatggacgtagaacaagacattttttgtcctatatatcagatacagttaatatctatatatgtattttaataaatcatggattttatatagatgccgaagacagttacggttgtacattattacatagatgtatatatcactataagaaatcagaatcagaatcatacaatgaattaattaagatattgttaaataatggatcagatgtagataaaaaagatacgtacggaaacacaccttttatcctattatgtaaacacgatatcaacaacgtggaattgtttgagatatgtttagagaatgctaatatagactctgtagactttaatagatatacacctcttcattatgtctcatgtcgtaataaatatgattttgtaaagttattaatttctaaaggagcaaatgttaatgcgcgtaataaattcggaactactccattttattgtggaattatacacggtatctcgcttataaaactatatttggaatcagacacagagttagaaatagataatgaacatatagttcgtcatttaataatttttgatgctgttgaatctttagattatctattatccagaggagttattgatattaactatcgtactatatacaacgaaacatctatttacgacgctgtcagttataatgcgtataatacgttggtctatctattaaacaaaaatggtgattttgagacgattactactagtggatgtacatgtatttcggaagcagtcgcaaacaacaacaaaataataatggaagtactattgtctaaacgaccatctttgaaaattatgatacagtctatgatagcaattactaaacataaacagcataatgcagatttattgaaaatgtgtataaaatatactgcgtgtatgaccgattatgatactcttatagatgtacagtcgctacagcaatataaatggtatattttaagatgtttcgatgaaatagatatcatgaagagatgttatataaaaaataaaactgtattccaattagttttttgtatcaaagacattaatactttaatgagatacggtaaacatccttctttcgtgaaatgcactagtctcgacgtatacggaagtcgtgtacgtaatatcatagcatctattagatatcgtcagagattaattagtctattatccaagaagctggatcctggagataaatggtcgtgttttcctaacgaaataaaatataaaatattggaaaactttaacgataacgaactatccacatatctaaaaatcttataaacattattaaaatataaaatctaagtaggataaaatcacactacatcattgtttccttttagtgctcgacagtgtatactatttttaacgctcataaataaaaatgaaaacgatttccgttgttacgttgttatgcgtactacctgctgttgtttattcaacatgtactgtacccactatgaataacgctaaattaacgtctaccgaaacatcgtttaatgataaccagaaagttacgtttacatgtgatcagggatatcattctttggatccaaatgctgtctgtgaaacagataaatggaaatacgaaaatccatgcaaaaaaatgtgcacagtttctgattatgtctctgaactatataataaaccgctatacgaagtgaattccaccatgacactaagttgcaacggcgaaacaaaatattttcgttgcgaagaaaaaaatggaaatacttcttggaatgatactgttacgtgtcctaatgcggaatgtcaacctcttcaattagaacacggatcgtgtcaaccagttaaagaaaaatactcatttggggaatatatgactatcaactgtgatgttggatatgaggttattggtgcttcgtacataagttgtacagctaattcttggaatgttattccatcatgtcaacaaaaatgtgatatgccgtctctatctaacggattaatttccggatctacattttctatcggtggcgttatacatcttagttgtaaaagtggttttacactaacggggtctccatcatccacatgtatcgacggtaaatggaatcccatactcccaatatgtgtacgaactaacgaaaaatttgatccagtggatgatggtcccgacgatgagacagatttgagcaaactctcgaaagacgttgtacaatatgaacaagaaatagaatcgttagaagcaacttatcatataatcatagtggcgttgacaattatgggcgtcatatttttaatctccgttatagtattagtttgttcctgtgacaaaaataatgaccaatataagttccataaattgctaccgtaaatataaatccgttaaaataattaataatttaataacaaacaagtatcaaaagattaaagacttatagctagaatcaattgagatgtcttcttcagtggatgttgatatctacgatgccgttagagcatttttactcaggcactattataacaagagatttattgtgtatggaagaagtaacgccatattacataatatatacaggctatttacaagatgcgccgttataccgttcgatgatatagtacgtactatgccaaatgaatcacgtgttaaacaatgggtgatggatacacttaatggtataatgatgaatgaacgcgatgtttctgtaagcgttggcaccggaatactattcatggaaatgtttttcgattacaataaaaatagtatcaacaatcaactaatgtatgatataattaatagcgtatctataattctagctaatgagagatatagaagcgcttttaacgacgatggtatatacatccgtagaaatatgattaacaagttgtacggatacgcatctctaactactattggcacgatcgctggaggtgtttgttattatctgttgatgcatctagttagtttgtataaataattatttcaatatactagttaaaattttaagattttaaatgtataaaaaactaataacgtttttatttgtaataggtgcattagcatcctattcgaataatgagtacactccgtttaataaactgagtgtaaaactctatatagatggagtagataatatagaaaattcatatactgatgataataatgaattggtgttaaattttaaagagtacacaatttctattattacagagtcatgcgacgtcggatttgattccatagatatagatgttataaacgactataaaattattgatatgtataccattgactcgtctactattcaacgcagaggtcacacgtgtagaatatctaccaaattatcatgccattatgataagtacccttatattcacaaatatgatggtgatgagcgacaatattctattactgcagagggaaaatgctataaaggaataaaatatgaaataagtatgatcaacgatgatactctattgagaaaacatactcttaaaattggatctacttatatatttgatcgtcatggacatagtaatacatattattcaaaatatgatttttaaaaatttaaaatatattatcacttcagtgacagtagtcaaataacaaacaacaccatgagatatattataattctcgcagttttgttcattaatagtatacatgctaaaataactagttataagtttgaatccgtcaattttgattccaaaattgaatggactggggatggtctatacaatatatcccttaaaaattatggcatcaagacgtggcaaacaatgtatacaaatgtaccagaaggaacatacgacatatccgcatttccaaagaatgatttcgtatctttctgggttaaatttgaacaaggcgattataaagtggaagagtattgtacgggactatgcgtcgaagtaaaaattggaccaccgactgtaacattgactgaatacgacgaccataaacagaaaaagtgtgcgtgacagcacagggagccacagaagggtttctcgaaaaaattactccatggagttcgaaagtatgtctgacacctaaaaagagtgtatatacatgcgcaattagatccaaagaagatgttcccaatttcaaggacaaaatggccagagttatcaagagaaaatttaatacacagtctcaatcttatttaactaaatttctcggtagcacatcaaatgatgttaccacttttcttagcatgcttaacttgactaaatattcataactaatttttattaatgatacaaaaacgaaataaaactgcatattatacactggttaacgcccttataggctctaaccattttcaagatgaggtccctgattatagtccttctgttcccctctatcatctactccatgtctattagacgatgtgagaagactgaagaggaaacatggggattgaaaatagggttgtgtataattgccaaagatttctatcccgaaagaactgattgcagtgttcatctcccaactgcaagtgaaggattgataactgaaggcaatggattcagggatatacgaaacaccgataaattataaaaaaagcaatgtgtccgctgtttccgttaataatactattttcgtaactggcggattattcataaataactctaatagcacgatcgtggttaacaatatggaaaaacttgacatttataaagacaaacaatggtcgattatagaaatgcctatggctagggtatatcacggcattgactcgacatttggaatgttatattttgccggaggtctatccgttaccgaacaatatggtaatttagagaaaaacaacgagatatcttgttacaatcctagaacgaataagtggtttgatatttcatatactatttataagatatccatatcatcattgtgtaaactaaataacgtcttctatgtatttagtaaggacattggatatgtggaaaagtatgatggtgcatggaagttagtacatgatcgtctccccgctataaaggcattatcaacttctccttattgattgaaaatataaatagtttttatgtatagcagtattaccctatagttttattgcttactactaacatggatacagatgttacaaatgtagaagatatcataaatgaaatagatagagagaaagaagaaatactaaaaaatgtagaaattgaaaataataaaaacattaacaagaatcatcccaatgaatatattagagaagcactcgttattaataccagtagtaatagtgattccattgataaagaagttatagaatgtatcagtcacgatgtaggaatatagatcatatctactaatttttataatcgatacaaaacataaaaaacaactcgttattacatagcaggcatggaatccttcaagtattgttttgataacgatggcaagaaatggattatcggaaatactttatattctggtaattcaatactctataaggtcagaaaaaatttcactagttcgttctacaattacgtaatgaagatagatcacaaatcacacaagccattgttgtctgaaatacgattctatatatctgtattggatcctttgactatcgacaactggacacgggaacgtggtataaagtatttggctattccagatctgtatggaattggagaaaccgatgattatatgttcttcgttataaagaattcgggaagagtattcgccccaaaggatactgaatcagtcttcgaagcatgcgtcactatgataaacacgttagagtttatacactctcgaggatttacccatggaaaaatagaaccgaggaatatactgattagaaataaacgtctttcactaattgactattctagaactaacaaactatacaagagtggaaactcacatatagattacaacgaggacatgataacttcaggaaatatcaattatatgtgtgtagacaatcatcttggagcaacagtttcaagacgaggagatttagaaatgttgggatattgcatgatagaatggttcggtggcaaacttccatggaaaaacgaaagtagtataaaagtaataaaacaaaaaaaagaatataaaaaatttatagctactttctttgaggactgttttcctgaaggaaatgaacctctggaattagttagatatatagaattagtatacacgttagattattctcaaactcctaattatgacagactacgtaaactgtttatacaagattgaaattatattcttttttttatagagtgtggtagtgttacggatatctaatattaatattagactatctctatcgcgctacacgaccaatatcgattactatggatatcttctatgaaaggagagaatgtatttatttctccagcgtcaatctcgtcagtattgacaatactgtattatggagctaatggatccactgctgaacagctatcaaaatatgtagaaacggaggagaacacggataaggttagcgctcagaatatctcattcaaatccatgaataaagtatatgggcgatattctgccgtgtttaaagattcctttttgagaaaaattggcgataagtttcaaactgttgacttcactgattgtcgcactatagatgcaatcaacaagtgtgtagatatctttactgaggggaaaatcaatccactattggatgaaccattgtctcctagcaattagtgccgtatactttaaagcaaaatggttgacgccattcgaaaaggaatttaccagtgattatcccttttacgtatctccgacggaaatggtagacgtaagtatgatgtctatgtacggcaaggcatttaatcacgcatctgtaaaagaatcattcggcaacttttcaatcatagaactgccatatgttggagatactagtatgatggtcattcttccagacaagattgatggattagaatccatagaacaaaatctaacagatacaaattttaagaaatggtgtgactttatggatgctatgtttatagatgttcacattcccaagtttaaggtaacaggctcgtataatctggtggatactctagtaaagtcaggactgacagaggtgttcggttcaactggagattatagcaatatgtgtaatttagatgtgagtgtcgacgctatgatccacaaaacgtatatagatgtcaatgaagagtatacagaagcagctgcagcaacttctgtactagtggcagactgtgcatcaacaattacaaatgagttctgtgcagatcatccgttcatctatgtgattaggcatgttgatggaaaaattcttttcgttggtagatattgctctccgacaactaattgttaaccattttttttaaaaaaaatagaaaaaacatgtggtattagtgcaggtcgttgttcttccaattgcaattggtaagatgacggccaactttagtacccacgtcttttcaccacagcactgtggatgtgacagactgaccagtattgatgacgtcaaacaatgtttgactgaatatatttattggtcgtcctatgcataccgcaacaggcaatgcgctggacaattgtattccacactcctctcttttagagatgatgcggaattagtgttcatcgacattcgcgagctggtaaaaaatatgccgtgggatgatgtcaaagattgtacagaaatcatccgttgttatataccggatgagcaaaaaaccatcagagagatttcggccatcatcggactttgtgcatatgctgctacttactggggaggtgaagaccatcccactagtaacagtctgaacgcattgtttgtgatgcttgagatgctaaattacgtggattataacatcatattccggcgtatgaattgatgagttgtacatcttgacattttctttcttctcttctccctttcttctcttctcccttcctccctcttctccctttcccagaaacaaacttttttacccactataaaataaaatgagtatactacctgttatatttctttctatatttttttattcttcattcgttcagacttttaacgcgtctgaatgtatcgacaaagggcaatattttgcatcattcatggagttagaaaacgagccagtaatcttaccatgtcctcaaataaatacgctatcatccggatataatatattagatattttatgggaaaaacgaggagcggataatgatagaattataccgatagataatggtagcaatatgctaattctgaacccgacacaatcagactctggtatttatatatgcattaccacgaacgaaacctactgtgacatgatgtcgttaaatttgacaatcgtgtctgtctcagaatcaaatatagattttatctcgtatccacaaatagtaaatgagagatctactggcgaaatggtatgtcccaatattaatgcatttattgctagtaacgtaaacgcagatattatatggagcggacatcgacgccttagaaataagagacttaaacaacggacacctggaattattaccatagaagatgttagaaaaaatgatgctggttattatacatgtgttttagaatatatatacggtggcaaaacatataacgtaaccagaattgtaaaattagaggtacgggataaaataataccttctactatgcaattaccagatggcattgtaacttcaataggtagtaatttgactattgcatcgttgagacctcccacaacggatgcagacgtcttttggataagtaatggtatgtattacgaagaagatgatggggacggaaacggtagaataagtgtagcaaataaaatctatatgaccgataagagacgtgttattacatcccggttaaacattaatcctgtcaaggaagaagatgctacaacgtttacgtgtatggcgtttactattcctagcatcagcaaaacagttactgttagtataacgtgaatgtatgttgttacatttccatgtcaattgagtttataagaatttttatacattatcttccaacaaacaattgacgaacgtattgctatgattaactcccacgatactatgcatattattaatcattaacttgcagactatacctagtgctattttgacatactcatgttcttgtgtaattgcggtatctatattattaaagtacgtaaatctagctatagttttattatttaattttagataatataccgtctccttatttttaaaaattgccacatcctttattaaatcatgaatgggaatttctatgtcatcgttagtatattgtgaacaacaagagcagatatctataggaaagggtggaatgcgatacattgatctatgtagttttaaaacacacgcgaactttgaagaatttatataaatcattccatcgatacatccttctatgttgagatgtatatatccaggaattcgtttattaatatcgggaaatgtataaactaaaacattgcccgaaagcggtgcctctatctgcgttatatccgttcttaacttacaaaatgtaaccaatacctttgcatgacttgttttgttcggcaacgttagtttaaacttgacgaatggattaattacaatagcatgatccgcgcatctattaagtttttttactttaacgcccttgtatgtttttacagagactttatctaaatttctagtgcttgtatgtgttataaatataacgggatatagaaccgaatcacctaccttagatacccaattacattttatcagatccagataataaacaaattttgtcgccctaactaattctatattgttatatattttacaattggttatgatatcatgtaataacttggagtctaacgcgcatcgtcgtacgtttatacaattgtgatttagtgtagtatatctacacatgtatttttccgcactatagtattctggactagtgataaaactatcgttatatctatcttcaatgaactcatcgagatattgctctctgtcatattcatacacctgcataaactttctagacatcttacaatccgtgttattttaggatcatatttacatatttacgggtatatcaaagatgttagattagttaatgggaatcgtctataataatgaatattaaacaattatatgaggacttttaccacaaagcatcataaaaatgagtcgtcgtctgatttatgttttaaatatcaaccgcaaatcaactcataaaatacaagagaatgaaatatatacatattttagtcattgcaatatagaccatacttctacagaacttgattttgtagttaaaaactatgatctaaacagacgacaacctgtaactgggtatactgcactacactgctatttgtataataattactttacaaacgatgtactgaagatattattaaatcatggagtggatgtaacgatgaaaaccagtagcggacgtatgcctgtttatatattgcttactagatgttgtaatatttcacatgatgtagtgatagatatgatagacaaagataaaaaccacttattacatagagactattccaacctattactagagtatataaaatctcgttacatgttattaaaggaagaggatatcgatgagaacatagtatccactttattagataagggaatcgatcctaactttaaacaagacggatatacagcgttacattattattatttgtgtctcgcacacgtttataaaccaggtgagtgtagaaaaccgataacgataaaaaaggccaagcgaattatttctttgtttatacaacatggagctaatctaaacgcgttagataattgtggtaatacaccattccatttgtatcttagtattgaaatgtgtaataatattcatatgactaaaatgctgttgacttttaatccgaatttcgaaatatgtaataatcatggattaacgcctatactatgttatataacttccgactacatacaacacgatattcttgttatgttaatacatcactatgaaacaaatgttggagaaatgccgatagatgagcgtcgtatgatcgtattcgagtttatcaaaacatattctacacgtccggcagattcgataacttatttgatgaataggtttaaaaatataaatatttatacccgctatgaaggaaagacattattacacgtagcatgtgaatataataatacacacgtaatagattatcttatacgtatcaacggagatataaatgcgttaaccgacaataacaaacacgctacacaactcattatagataacaaagaaaattccccatataccattaattgtttactgtatatacttagatatattgtagataagaatgtgataagatcgttggtggatcaacttccatctctacctatcttcgatataaaatcatttgagaaattcatatcctactgtatacttttagatgacacattttacgataggcacgttaagaatcgcgattctaaaacgtatcgatacgcattttcaaaatacatgtcgtttgataaatacgatggtataataactaaatgtcacgacgaaacaatgttactcaaactgtccactgttctagacactacactatatgcagttttaagatgtcataattcgagaaagttaagaagatacctcaacgagttaaaaaaatataataacgataagtcctttaaaatatattctaatattatgaatgagagataccttaatgtatattataaagatatgtacgtgtcaaaggtatatgataaactatttcctgttttcacagataaaaattgtctactaacattactaccttcagaaattatatacgaaatattatacatgctgacaattaacgatctttataatatatcgtatccacctaccaaagtatagttgtatttttctcatgcgatgtgtgtaaaaaaactgatattatataaatattttagtgccgtataataaagatgacgatgaaaatgatggtacatatatatttcgtatcattattgttattgctattccacagttacgccatagacatcgaaaatgaaatcacagaattcttcaataaaatgagagatactctaccagctaaagactctaaatggttgaatccagcatgtatgttcggaggcacaatgaatgatatagccgctctaggagagccattcagcgcaaagtgtcctcctattgaagacagtcttttatcgcacagatataaagactatgtggttaaatgggagaggctagaaaagaatagacggcgacaggtttctaataaacgtgttaaacatggtgatttatggatagccaactatacatctaaattcagtaaccgtaggtatttgtgcaccgtaactacaaagaatggtgactgtgttcagggtatagttagatctcatattaaaaaacctccttcatgcattccaaaaacatatgaactaggtactcatgataagtatggcatagacttatactgtggaattctttacgcaaaacattataataatataacttggtataaagataataaggaaattaatatcgacgacattaagtattcacaaacgggaaaggaattaattattcataatccagagttagaagatagcggaagatacgactgttacgttcattacgacgacgttagaatcaagaatgatatcgtagtatcaagatgtaaaatacttacggttataccgtcacaagaccacaggtttaaactaatactagatccgaaaatcaacgtaacgataggagaacctgccaatataacatgcactgctgtgtcaacgtcattattgatcgacgatgtactgattgaatgggaaaatccatccggatggcttataggattcgattttgatgtatactctgttttaactagtagaggcggtatcaccgaggcgaccttgtactttgaaaatgttactgaagaatatataggtaatacatataaatgtcgtggacacaactattattttgaaaaaacccttacaactacagtagtattggagtaaatatacaatgcatttttatatacattactgaattattattactgaattattattactgaattattattaattatatcgtatttgtgctatagaatggatgaagatacgcgactatctaggtatttgtatctcaccgatagagaacatataaatgtagactctattaaacagttgtgtaaaatatcagatcctaatgcatgttatagatgtggatgtacggctttacatgagtacttttataattatagatcagtcaacggaaaatacaagtatagatacaacggttactatcaatattattcatctagcgattatgaaaattataatgaatattattatgatagaactggtatgaacagtgagagtgataatatatcaatcaaaacagaatatgaattctatgatgaaacacaagatcaaagtacacaactagtaggttacgacattaaactcaaaaccaatgaggatgattttatggctatgatagatcagtgggtgtccatgattatatagatgaatcaattaataaagtagtatatggaagagagtctcacgtaagatggcgggatatatggcaagaacataatgatggcgtatacagtataggaaaggagtgcatagataatatatacgaagacaaccataccgtagacgaattctacaagatagacagcgtatcagatgtagatgacgcggaacacatatctccgataactaaaaaaccatagaatcagttgatgataatacctacatttctaatcttccgtataccatcaaatacaaaatattcgagcaacaataagtattttttatacctttaaaactgataaataaattttttctagtgatattttggcaagatgagaatcctatttctcatcgctttcatgtatgggtgtgttcactcatatgttaacgcggttgaaaccaaatgtccaaatctagacattgtaacatcttctggagaatttcattgttcaggatgtgtggaacatatgcctgagtttagctatatgtattggttggcaaaggatatgaaatcggacgaggataccaagtttatagaacatctgggtgatggcatcaaagaagatgaaaccgttcgtaccacagatagtggaatcgtcactctacgtaaagtccttcatgtaaccgatactaataaatttgataattataggttcacttgtgtcctcactacgatagatggcgtttcaaaaaagaatatttggctgaagtagtgcgtgctactatttttatttatgatataatctaatggaattaatttgaattgatatttatccaatactaaagattatattagaatcaaattaatcttttatacgagaaaaaataacgacatacgtcgtcaacaaattaaactttttatttattagttaactagcttatagaacttgctcattgttatgtttctaaaacgggtacggcatataggacaattatccgacgcaccggtttctcttcgtgttctatgccatatattgatgcatgttatgcaaaatatatgagtacacgaatccaataaaccaaagtatctatcgttttgagtaaacaacttcatagcaaattccacattctttttctttacttactctatacacgtcctcgtatttatttagtattttgatgatatccaactcagaaatggttgttgtattattgggtgtataggtattattagctatgtaccaatttaccaaccctcttaatattgattgataatcacatcggttatccaatcaataaccacattaataactaaattgtagtgtatatatagaccatatatgtttctatttttttgacagttacgtatagtttcagtaagttttgattgttgtattcctgtatctctagataagttagtcatatagtcccttccggcgatacgttttttccaagcccgaaattgattagccaaatgtgtatttatttttgtgatattgatataatatttcggataatgcatactgttagtcttatatcatttggttcatctatgtattgtaatattgttacatgatctatagatgatgtattgattttggcaggatcgaattccatatccgcgactaaacagtgaaaaaaatgtaaatactttttaaattttaaattagtaaaacttttttttattttttatgattccaaaaatactgaatacaaagtcctaaattataaatatggagatcatactaccacaacttattattatgtatacaaggccggtgtaatagatagatatatataattctattacaccggcagacaattaccgaccggtatttgtcgttaccaacataccgtataatatgtaatatacaattccataacccattgacagttgttatacatcaaaattgcaattcttttgattacgatgttataagaatgtagttaattgatgtatgatgttaatgtgtcctctttcctcttataacatcgtaatcaaaaacttttttataatatatacctaataatgtgtcttaatagttctcgtgattcgtcaaacaatcattcttataaaatataataaagcaacgtaaaaacacataaaaataagcgtaactaataagacaatggatatttacgacgataaaggtctacagactattaaactgtttaataatgaatttgattgtataaggaatgacatcagagaattatttaaacatgtaactgattccgatagtatacaacttccgatggaagacaattctgatattatagaaaatatcagaaaaatactatatagacgattaaaaaatgtagaatgtgttgacatcgataacacaataacttttatgaaatacgatccaaatgatgataataagcgtacgtgttctaattgggtacccttaactaataactatatggaatattgtctagtaatatatttggaaacaccgatatgtggaggcaaaataaaattataccaccctacaggaaatataaagtcggataaggatattatgtttgcaaagactctagactaagatagacagcgtatcagatgtagatgacgcggaacacatatctcctataactaatgatgtatctacacaaacatgggaaaagaaatcagagttagatagatacatggaatcgtatcctcgtcatagatatagtaaacattctgtatttaagggattttctgataaagttagaaaaaatgatttagacatgaatgtggtaaaagaattactttctaacggtgcatctctaacaatcaaggatagcagtaataaggatccaattgctgtttattttagaagaacgataatgaatttagaaatgattgatattattaacaaacatacaactattgatgaacgaaagtatatagtacactcctatctaaaaaattatagaaatttcgattatccatttttcaggaagttagttttgactaataaacattgtctcaacaattattataatataagcgacagcaaatatggaacaccgctacatatattggcgtctaataaaaaattaataactcctaattacatgaagttattagtgtataacggaaatgatataaacgcacgaggtgaagatacacaaatgcgaaccaactcagaaatggttgttgtattattgggtgtataggtattattagctatgtaccaatttaccaaccctcttaatattgattgataatcacatcggttatccaattaataactaaattgtagtgtatatatagaccatatatgtttctatttttttgacagttacgtatagtttcagtaagttttgattgttgtattcctgtatctctagataagttagtcatatagtcccttccggcgatacgttttttccaagcccgaaattgattagccaaatgtgtatttatttttgtgatattgatataatatttcggataatgcatactgttagtcttatatcatttggttcatctatgtattgtaatattgttacatgatctatagatgatgtattgattttggcaggatcgaattccatatccgcgactaaacagtgaaaaaaatgtaaatactttttaaattttaaattagtaaaacttttttttattttttatgattccaaaaatactgaatacaaagtcctaaattataaatatggagatcatactaccacaacttattattatgtatacaaggccggtgtaatagatagatatatataattctattacaccggcagacaattaccgaccggtatttgtcgttaccaacataccgtataatatgtaatatacaattccataacccattgacagttgttatacatcaaaattgcaattcttttgattacgatgttataagaatgtagttaattgatgtatgatgttaatgtgtcctctttcctcttataacatcgtaatcaaaaacttttttataatatatacctaataatgtgtcttaatagttctcgtgattcgtcaaacaatcattcttataaaatataataaagcaacgtaaaaacacataaaaataagcgtaactaataagacaatggatatttacgacgataaaggtctacagactattaaactgtttaataatgaatttgattgtataaggaatgacatcagagaattatttaaacatgtaactgattccgatagtatacaacttccgatggaagacaattctgatattatagaaaatatcagaaaaatactatatagacgattaaaaaatgtagaatgtgttgacatcgataacacaataacttttatgaaatacgatccaaatgatgataataagcgtacgtgttctaattgggtacccttaactaataactatatggaatattgtctagtaatatatttggaaacaccgatatgtggaggcaaaataaaattataccaccctacaggaaatataaagtcggataaggatattatgtttgcaaagactctagactttaaatcaacgaaagtgttaactggacgtaaaacaattgccgttctagacatatccgtttcatataatagatcaatgactactattcactacaacgacgacgttgatatagatatacatactgataaaaatggaaaagagttatgttattgttatataacaatagatgatcattacttggttgatgtggaaactataggagttatagtcaatagatctggaaaatgtctgttagtaaataaccatctaggtataggtatcgttaaagataaacgtataagcgatagttttggagatgtatgtatggatacaatatttgacttttctgaagcacgagagttattttcattaactaatgatgataacaggaatatagcatgggacactgataaactagacgatgatacagatatatggactcccgtcacagaagatgattacaaatttctttctagactagtattgtatgcaaaatctcaatcggatactgtatttgactattatgttcttactggtgatacggaaccacccactgtattcattttcaaggtaactagattttactttaatatgccgaaataaaaaatttttgtataatatctagaggtagaggtattgtttagataaatacaaataacatagatacatcgcatacttagcatttttataaatatacataagacatacactttatacatttttgtaaaaatactcataaaaaaatttataaaaattatggcacaaccatatcttgtataggtagtttagttcgtcgagtgaacctataaacagataatagacaacacataataatgcctactaatacaagcataataccgggagatgggatatatgacgttgtagtgtttgggttttctgaacgttgatagtctactaatactacatgctgacatctaatgcctgtataaccatgagagcatctacaatacataccgtcaatatctctagcgtggatacagtcaccgtgtaaacaatatccatctccctctggaccgcataatctgatagctggaatatctgttgtagcgtttgtaatttctggcaatgtcgtttcgatagcgttaccactatcggcgaatgatctgattatcatagcagcgaacaacaacatcagataatttatcaacatttttgatggattctgtgtttatgctgtttctcagtgtgtgtttatgacaagattgggaattttatattattaattcagtaatataaactaataatatattgttaattgtgtaaataatataaaaataacaatacaatattgaatgtgttgctgttaaaaatgtatgtgttaatataatagaataaaataaatgagtatgatcattttagataacgattgattttatcattaccgcttcattcttatattctttgcttacggaacctatatttagaaacatctactaacaattttttatgcttgcattattaatggtatgtaatatgattgattgtgtacgcaataccaatttgttaagtatgaatacggggtacaaacataaattgaaatttaacattatttatttatgatatatatcgttatcgttaggtctataccatggatatctttaaagaactaatcttaaaacaccctgatgaaaatgttttgatttctccagtttccattttatctactttatctattctaaatcatggagcagctggttctacagctgaacaactatcaaaatatatagagaatatgaatgagaatacacccgatgacaataatgatgacatggaggtagatattccgtattgtgcgacactagctaccgcaaataaaatatacggtagcgatagtatcgagttccacgcctccttcctacaaaaaataaaagacgattttcaaactgtaaactttaataatgctaaccaaacaaaggaactaatcaacgaatgggttaagacaatgacaaatggtaaaattaattccttattgactagtccgctatccattaatactcgtatgacagttgttagcgccgtccattttaaagcaatgtggaaatatccattttctaaacatcttacatatacagacaagttttatatttctaagaatatagttaccagcgttgatatgatggtgggtaccgagaataacttgcaatatgtacatattaatgaattattcggaggattctctattatcgatattccatacgagggaaactctagtatggtaattatactaccggacgacatagaaggtatatataacatagaaaaaaatataacagatgaaaaatttaaaaaatggtgtggtatgttatctactaaaagtatagacttgtatatgccaaagtttaaagtggaaatgacagaaccgtataatctggtaccgattttagaaaatttaggacttactaatatattcggatattatgcagattttagcaagatgtgtaatgaaactatcactgtagaaaaatttctacatacgacgtttatagatgttaatgaggagtatacagaagcatcggccgttacaggagtatttacgattaacttttcgatggtatatcgtacgaaggtctacataaaccatccattcatgtacatgattaaagacaccacaggacgtatactttttatagggaaatactgctatccgcaataaatataaacaaatagacttttataaagagtcttcaacgataagtatatcgacatactacttatgctgcgaaagattctgaacgagaacgactatctcaccctcttggatcatatccgcactgctaaatactaaatctccactacactttttatcatcttatgaggaatgattgccttcgtgaaataggaataattagcaccagaatagctatggattattgtggtagagagtgcactattctatgtcgtctactggatgaagatgtgacgtacaaaaaaataaaactagaaattgaaacgtgtcacaacttatcaaaacatatagatagacgaggaaacaatgcgctacattgttacgtctccaataaatgcgatacagacattaagattgttctctcgcggagtcgagagactttgtagaaacaacgaaggattaactccgctaggagtatacagtaagcatagatacgtaaaatctcagattgtgcatctactgatatccagctattcaaattcctctaacgaactcaagtcgaatataaatgatttcgatctgtattcggataatatcgacttacgtctgctaaaatacctaattgtggataaacggatacgtccgtccaagaatacgaattatgcaatcaatggtctcggattggtggatatatacgtaacgacgcctaatccgagaccagaagtattgctatggcttcttaaatcagaatgttacagcaccggttacgtatttcgtacctgtatgtacgacagtgatatgtgtaagaactctcttcattactatatatcgtctcatagagaatctcaatctctatccaaggatgtaattaaatgtttgatcgataacaatgtttccatccatggcagagacgaaggaggatctttacccatccaatactactggtctttctcaaccatagatatagagattgttaaattattattaataaaggatgtggacacgtgtagagtatacgacgtcagccctatattagaggcgtattatctaaacaagcgatttagagtaaccccatataatgtagacatggaaatcgttaatcttcttattgagagacgtcatactcttgtcgacgtaatgcgtagtattacttcgtacgattccagagaatataaccactacatcatcgataacattctaaagagatttagacaacaggatgtacaagccatgttgataaactacttacattacggcgatatggtcgttcgatgcatgttagataacggacaacaactatcctctgcacgactactttgttaataataatctcgtcgatgtaaacgtcgtaaggtttatcgtggaaaatatggacacgcggctgtaaatcacgtatcgaacaatggccgtctatgtatgtacggtctgatattatcgagatttaataattgcgggtatcactgttatgaaaccatactgatagatgtatttgatatactaagcaagtacatggatgatatagatatgatcgataactctactatattacgcggtcgatgtcaataatatacaatttgcaaagcggttattggaatatggagcgagtgtcacgctcgataatcaatacggccatccagaaaagcagttaccaaagagaaaacaaaacgaagctagttgatttattactgagttaccatcccactctagagactatgattgacgcatttaatagagatatacgctatctatatcctgaaccattattcgcctgtatcagatacgccttaatcctagatgatgattttccttctaaagtaaagtatgatatcgccggtcgtcataaggaactaaagcgctatagagtagacattaatagaatgaagaatgtctacatatcaggcgtctccatgtttgatatattatttaaacgaagcaaacgccacaaattgagatacgcaaagaatccgacatcaaatggtacaaaaaagaactaacgtccatcattacagaaactgtaaagaacaatgagaggatcgactccatagtggacaacattaatacagacgataacttgatttcgaaattacccatggagatactttattactccattaaataatttatcatggagcgataatgtcctgtttcatttgtttccatgacatattacaaaatcgattccgtccaagatgataaaaacatttaccggcatcataaacacggagtttattttatatgtctcgcataaacattactaaaaaaatatattgtcgataacttgatttcgaaattacccatggagatactttattactccattaaataatttatcatggagcgataatgtcctgtttcatttgtttccatgacatattacaaaatcgattccgtccaagatgataaaaacatttaccggcatcataaacacggagtttattttatatgtctcgcataaacattactaaaaaaatatattgttctgtttttctttcacatctttaattatgaaaaagtaaatcattatgagatggacgagattgtacgcatcgttcgcgacagtatgtggtacatacctaacgtatttatggacgacggtaagaatgaaggtcacgtttctgtcaacaatgtctgtcatatgtattttacgttctttgatgtggatacatcgtctcatctgtttaagctagttattaaacactgcgatctgaataaacgaggtaactctccattacattgctatacgatgaatacacgatttaatccatctgtattaaagatattgttacaccacggcatgcgtaactttgatagcaaggatgaccactatcaatcgataacaagatctttgatatactaacggacaccattgatgactttagtaaatcatccgatctattgctgtgttatcttagatataaattcaatgggagcttaaactattacgttctgtacaaaggatccgaccctaattgcgccgacgaggatgaactcacttctcttcattactactgtaaacacatatccacgttctacgaaagcaattattacaagttaagtcacactaagatgcgagccgagaagcgattcatctacgcgataatagattatggagcaaacattaacgcggttacacacttaccttcaacagtataccaaacatagtcctcgtgtggtgtatgctcttttatctcgaggagccgatacgaggatacgtaataatcttgattgtacacccatcatggaacgattgtgcaacaggtcatattctcataatgttactcaattggcacgaacaaaaggaagaaggacaacatctactttatctattcataaaacataatcaaggatacactctcaatatactacggtatctattagataggttcgacattcagaaagacgaatactataataccgcctttcaaaattgtaacaacaatgttgcctcatacatcggatacgacatcaaccttccgactaaagacggtattcgacttggtgtttgaaaacagaaacatcatatacaaggcggatgttgtgaatgacatcatccaccacagactgaaagtatctctacctatgattaaatcgttgttctacaagatgtctctccctacgacgattactacgtaaaaaagatactagcctactgcctattaagggacgagtcattcgcggaactacatagtaaattctgtttaaacgaggactataaaagtgtatttatgaaaaatatatcattcgataagatagattccatcatcgtgacataagtcgcctcaaagagattcgaatctccgacaccgacctgtatacggtatcacagctatcttaaagccatacattcagacagtcacatttcatttcccatgtacgacgatctcatagaacagtgccatctatcgatggagcgtaaaagtaaactcgtcgacaaagcactcaataaattagagtctaccatcggtcaatctagactatcgtatttgcctccggaaattatgcgcaatatcatctaaacagtatgttgtacggaaagaaccattacaaatattatccatgatagaaagaaaatatctatatgattggagaagtaggaaacaggaacaagacaacgattactacattattaaatcatgaagtccgtattatactcgtatatattgtttctctcatgtataataataaacggaagagatatagcaccgcatgcaccatccgatggaaagtgtaaagacaacgaatacaaacgccataatttgtgtccgggaacatacgcttccagattatgcgatagcaagactaacacacgatgtacgccgtgtggttcgggtaccttcacatctcgcaataatcatttacccgcttgtctaagttgtaacggaagacgcgatcgtgtaacacgactcacaatagaatctgtgaatgctctcccggatattattgtcttctcaaaggatcatccggatgcaaggcatgtgtttcccaaacaaaatgtggaataggatacggagtatccggagacgtcatctgttctccgtgtggtctcggaacatattctcacaccgtctcttccgcagataaatgcgaacccgtacccagaaatacgtttaactatatcgatgtggaaattaacctgtatccagttaacgacacgtcgtgtactcggacgaccactaccggtctcagcgaatccatctcaacgtcggaactaactattactatgaatcataaagactgtaatcccgtatttcgtgatggatacttctccgttcttaataaggtagcgacttcaggtttctttacaggagaaaggtgtgcactctgaatttcgagattaaatgcaataacaaagattcttcctccaaacagttaacgaaagcaaagaatgatactatcatgccgcattcggagacagtaactctagtgggcgacatctatatactatatagtaataccaatactcaagactacgaaactgatacaatctcttatcatgtgggtaatgttctcgatgtcgatagccatatgcccggtagttgcgatatacataaactgatcactaattccaaacccacccactttttatagtaagtttttcacccataaataataaatacaataattaatttctcgtaaaagtagaaaatatattctaatttattgcacggtaaggaagtagaatcataaagaacagtactcaatcaatagcaattatgaaacaatatatcgtcctggcatgcatgtgcctggcggcagctgctatgcctgccagtcttcagcaatcatcctcatcctcctcctcgtgtacggaagaagaaaacaaacatcatatgggaatcgatgttattatcaaagtcacaaagcaagaccaaacaccgaccaatgataagatttgccaatccgtaacggaaattacagagtccgagtcagatccagatcccgaggtggaatcagaagatgattccacatcagtcgaggatgtagatcctcctaccacttattactccatcatcggtggaggtctgagaatgaactttggattcaccaaatgtcctcagattaaatccatctcagaatccgctgatggaaacacagtgaatgctagattgtccagcgtgtccccaggacaaggtaaggactctcccgcgatcactcatgaagaagctcttgctatgatcaaagactgtgaagtgtctatcgacatcagatgtagcgaagaagagaaagacagcgacatcaagacccatccagtactcgggtctaacatctctcataagaaagtgagttacgaagatatcatcggttcaacgatcgtcgatacaaaatgcgtcaagaatctagagtttagcgttcgtatcggagacatgtgcaaggaatcatctgaacttgaggtcaaggatggattcaagtatgtcgacggatcggcatctgaaggtgcaaccgatgatacttcactcatcgattcaacaaaactcaaagcgtgtgtctgaatcgataactctattcatctgaaattggatgagtagggttaatcgaacgattcaggcacaccacgaattaaaaaagtgtaccggacactatattccggtttgcaaaacaaaaatgttcttaactacattcacaaaaagttacctctcgcgacttcttctttttctgtctcaatagtgtgatacgattatgacactattcctattcctattcctatttcctttcagagtatcacaaaaatattaaacctctttctgatggtctcataaaaaaagttttacaaaaatatttttattctctttctctctttgatggtctcataaaaaaagttttacaaaaatatttttattctctttctctctttgatggtctcataaaaaaagttttacaaaaatatttttattctctttctctctttgatggtctcataaaaaaagttttacaaaaatatttttattctctttctctctttgatggtctcataaaaaaagttttacaaaaatatttttattctctttctctctttgatggtctcataaaaaaagttttacaaaaatatttttattctctttctctctttgatggtctcataaaaaaagttttacaaaaatatttttattctctttctctctttgatggtctcataaaaaaagttttacaaaaatatttttattctctttctctctttgatggtctcataaaaaaagttttacaaaaatatttttattctctttctctctttgatggtctcataaaaaaagttttacaaaaatatttttattctctttctctctttgatggtctcataaaaaaagttttacaaaaatatttttattctctttctctctttgatggtctcataaaaaaagttttacaaaaatatttttattctctttctctctttgatggtctcataaaaaaagttttacaaaaatatttttattctctttctctctttgatggtctcataaaaaaagttttacaaaaatatttttatt

SEQ ID NO: 3 - DNA, 201446 bp, Artificial Sequence
  GLV-1h188 genome
ttatgagaccatcaaagagagaaagagaataaaaatatttttgtaaaactttttttatgagaccatcaaagagagaaagagaataaaaatatttttgtaaaacttttttatgagaccatcaaagagagaaagagaataaaaatatttttgtaaaacttttttatgagaccatcaaagagagaaagagaataaaaatatttttgtaaaactttttttatgagaccatcaaagagagaaagagaataaaaatatttttgtaaaactttttttatgagaccatcaaagagagaaagagaataaaaatatttttgtaaaactttttttatgagaccatcaaagagagaaagagaataaaaatatttttgtaaaactttttttatgagaccatcaaagagagaaagagaataaaaatatttttgtaaaactttttttatgagaccatcaaagagagaaagagaataaaaatatttttgtaaaactttttttatgagaccatcaaagagagaaagagaataaaaatatttttgtaaaactttttttatgagaccatcaaagagagaaagagaataaaaatatttttgtaaaactttttttatgagaccatcaaagagagaaagagaataaaaatatttttgtaaaactttttttatgagaccatcaaagagagaaagagaataaaaatatttttgtaaaactttttttatgagaccatcaaagagagaaagagaataaaaatatttttgtaaaactttttttatgagaccatcaaagagagaaagagaataaaaatatttttgtaaaactttttttatgagaccatcagaaagaggtttaatatttttgtgatactctgaaaggaaataggaataggaataggaatagtgtcataatcgtatcacactattgagacagaaaaagaagaagtcgcgagaggtaactttttgtgaatgtagttaagaacatttttgttttgcaaaccggaatatagtgtccggtacacttttttaattcgtggtgtgcctgaatcgttcgattaaccctactcatccaatttcagatgaatagagttatcgattcagacacacgctttgagttttgttgaatcgatgagtgaagtatcatcggttgcaccttcagatgccgatccgtcgacatacttgaatccatccttgacctcaagttcagatgattccttgcacatgtctccgatacgaacgctaaactctagattcttgacgcattttgtatcgacgatcgttgaaccgatgatatcttcgtaactcactttcttatgagagatgttagacccgagtactggatgggtcttgatgtcgctgtctttctcttcttcgctacatctgatgtcgatagacacttcacagtctttgatcatagcaagagcttcttcatgagtgatcgcgggagagtccttaccttgtcctggggacacgctggacaatctagcattcactgtgtttccatcagcggattctgagatggatttaatctgaggacatttggtgaatccaaagttcattctcagacctccaccgatgatggagtaataagtggtaggaggatctacatcctcgactgatgtggaatcatcttctgattccacctcgggatctggatctgactcggactctgtaatttccgttacggattggcaaatcttatcattggtcggtgtttggtcttgctttgtgactttgataataacatcgattcccatatgatgtttgttttcttcttccgtacacgaggaggaggatgaggatgattgctgaagactggcaggcatagcagctgccgccaggcacatgcatgccaggacgatatattgtttcataattgctattgattgagtactgttctttatgattctacttccttaccgtgcaataaattagaatatattttctacttttacgagaaattaattattgtatttattatttatgggtgaaaaacttactataaaaagtgggtgggtttggaattagtgatcagtttatgtatatcgcaactaccgggcatatggctatcgacatcgagaacattacccacatgataagagattgtatcagtttcgtagtcttgagtattggtattactatatagtatatagatgtcgcccactagagttactgtctccgaatgcggcatgatagtatcattctttgctttcgttaactgtttggaggaagaatctttgttattgcatttaatctcgaaattcagagtgcacacctttctcctgtaaagaaacctgaagtcgctaccttattaagaacggagaagtatccatcacgaaatacgggattacagtctttatgattcatagtaatagttagttccgacgttgagatggattcgctgagaccggtagtggtcgtccgagtacacgacgtgtcgttaactggatacaggttaatttccacatcgatatagttaaacgtatttctgggtacgggttcgcatttatctgcggaagagacggtgtgagaatatgttccgagaccacacggagaacagatgacgtctccggatactccgtatcctattccacattttgtttgggaaacacatgccttgcatccggatgatcctttgagaagacaataatatccgggagagcattcacagattctattgtgagtcgtgttacacgatcgcgtcttccgttacaacttagacaagcgggtaaatgattattgcgagatgtgaaggtacccgaaccacacggcgtacatcgtgtgttagtcttgctatcgcataatctggaagcgtatgttcccggacacaaattatggcgtttgtattcgttgtctttacactttccatcggatggtgcatgcggtgctatatctcttccgtttattattatacatgagagaaacaatatatacgagtataatacggacttcatgatttaataatgtagtaatcgttgtcttgttcctgtttcctacttctccaatcatatagatattttctttctatcatggataatatttgtaatggttctttccgtacaacatactgtttagatgatattgcgcataatttccggaggcaaatacgatagtctagattgaccgatggtagactctaatttattgagtgctttgtcgacgagtttacttttacgctccatcgatagatggcactgttctatgagatcgtcgtacatgggaaatgaaatgtgactgtctgaatgtatggctttaagatagctgtgataccgtatacaggtcggtgtcggagattcgaatctctttgaggcgacttatgtcacgatgatggaatctatcttatcgaatgatatatttttcataaatacacttttatagtcctcgtttaaacagaatttactatgtagttccgcgaatgactcgtcccttaataggcagtaggctagtatcttttttacgtagtaatcgtcgtagggagagacatcttgtagaacaacgatttcgttttgttttctcttctgtaactgcttttctggatggccgtattgattatcgagcgtgatactcgctccatattccaataaccgctttgcaaattgtatattattgacatcgaccgcgtaatatagtagagttatcgatcatatctatatcatccatgtacttgcttagtatatcaaatacatctatcagtatggtttcataacagtgatacccgcaattattaaatctcgataatatcagaccgtacatacatagacggccattgttcgatacgtgatttacagccgcgtgtccatattttccacgataaaccttacgacgtttacatcgacgagattattattaacaaagtagtcgtgtagaggatagttgttgtccgttatctaacatgcatcgaacgaccatatcgccgtaatgtaagtagtttatcagtatggcttgtacgatggattcatcctgttgtctaaatctctttagaatgttatcgatgatgtagtggttatattctctggaatcgtacgaagtaatactacgcattacgtcgacaagagtatgacgtctctcaataagaagattaacgatttccatgtctacattatatggggttactctaaatcgcttgtttagataatacgcctctaatatagggctgacgtcgtatactctacacgtgtccacatcctttattaataataatttaacaatctctatatctatggttgagaaagaccagtagtattggatgggtaaagatcctccttcgtctctgccatggatggaaacattgttatcgatcaaacatttaattacatccttggatagagattgagattctctatgagacgatatatagtaatgaagagagttcttacacatatcactgtcgtacatacaggtacgaaatacgtaaccggtgctgtaacattctgatttaagaagccatagcaatacttctggtctcggattaggcgtcgttacgtatatatccaccaatccgagaccattgattgcataattcgtattcttggacggacgtatccgtttatccacaattaggtattttagcagacgtaagtcgatattatccgaatacagatcgaaatcatttatattcgacttgagttcgttagaggaatttgaatagctggatatcagtagatgcacaatctgagattttacgtatctatgcttactgtatactcctagcggagttaatccttcgttgtttctacaaagtctctcgactccgcgagagaacaatcttaatgtctgtatcgcatttattggagacgtaacaatgtagcgcattgtttcctcgtctatctatatgttttgataagttgtgacacgtttcaatttctagttttatttttttgtacgtcacatcttcatccagtagacgacatagaatagtgcactctctaccacaataatccatagctattctggtgctaattattcctatttcacgaaggcaatcattcctcataagatgataaaaagtgtagtggagatttagtatttagcagtgcggatatgatccaagagggtgagatagtcgttctcgttcagaatctttcgcagcataagtagtatgtcgatatacttatcgttgaagactctttataaaagtctatttgtttatatttattgcggatagcagtatttccctataaaaagtatacgtcctgtggtgtctttaatcatgtacatgaatggatggtttatgtagaccttcgtacgatataccatcgaaaagttaatcgtaaatactcctgtaacggccgatgcttctgtatactcctcattaacatctataaacgtcgtatgtagaaatttttctacagtgatagtttcattacacatcttgctaaaatctgcataatatccgaatatattagtaagtcctaaattttctaaaatcggtaccagattatacggttctgtcatttccactttaaactttggcatatacaagtctatacttttagtagataacataccacaccattttttaaatttttcatctgttatatttttttctatgttatatataccttctatgtcgtccggtagtataattaccatactagagtttccctcgtatggaatatcgataatagagaatcctccgaataattcattaatatgtacatattgcaagttattctcggtacccaccatcatatcaacgctggtaactatattcttagaaatataaaacttgtctgtatatgtaagatgtttagaaaatggatatttccacattgctttaaaatggacggcgctaacaactgtcatacgagtattaatggatagcggactagtcaataaggaattaattttaccatttgtcattgtcttaacccattcgttgattagttcctttgtttggttagcattattaaagtttacagtttgaaaatcgtcttttattttttgtaggaaggaggcgtggaactcgatactatcgctaccgtatattttatttgcggtagctagtgtcgcacaatacggaatatctacctccatgtcatcattattgtcatcgggtgtattctcattcatattctctatatattttgatagttgttcagctgtagaaccagctgctccatgatttagaatagataaagtagataaaatggaaactggagaaatcaaaacattttcatcagggtgttttaagattagttctttaaagatatccatggtatagacctaacgataacgatatatatcataaataaataatgttaaatttcaatttatgtttgtaccccgtattcatacttaacaaattggtattgcgtacacaatcaatcatattacataccattaataatgcaagcataaaaaattgttagtagatgtttctaaatataggttccgtaagcaaagaatataagaatgaagcggtaatgataaaatcaatcgttatctaaaatgatcatactcatttattttattctattatattaacacatacatttttaacagcaacacattcaatattgtattgttatttttatattatttacacaattaacaatatattattagtttatattactgaattaataatataaaattcccaatcttgtcataaacacacactgagaaacagcataaacacagaatccatcaaaaatgttgataaattatctgatgttgttgttcgctgctatgataatcagatcattcgccgatagtggtaacgctatcgaaacgacattgccagaaattacaaacgctacaacagatattccagctatcagattatgcggtccagagggagatggatattgtttacacggtgactgtatccacgctagagatattgacggtatgtattgtagatgctctcatggttatacaggcattagatgtcagcatgtagtattagtagactatcaacgttcagaaaacccaaacactacaacgtcatatatcccatctcccggtattatgcttgtattagtaggcattattatgtgttgtctattatctgtttataggttcactcgacgaactaaactacctatacaagatatggttgtgccataatttttataaatttttttatgagtatttttacaaaaatgtataaagtgtatgtcttatgtatatttataaaaatgctaagtatgcgatgtatctatgttatttgtatttatctaaacaatacctctacctctagatattatacaaaaattttttatttcggcatattaaagtaaaatctagttaccttgaaaatgaatacagtgggtggttccgtatcaccagtaagaacataatagtcaaatacagtatccgattgagattttgcatacaatactagtctagaaagaaatttgtaatcatcttctgtgacgggagtccatatatctgtatcatcgtctagtttatcagtgtcccatgctatattcctgttatcatcattagttaatgaaaataactctcgtgcttcagaaaagtcaaatattgtatccatacatacatctccaaaactatcgcttatacgtttatctttaacgatacctatacctagatggttatttactaacagacattttccagatctattgactataactcctatagtttccacatcaaccaagtaatgatcatctattgttatataacaataacataactcttttccatttttatcagtatgtatatctatatcaacgtcgtcgttgtagtgaatagtagtcattgatctattatatgaaacggatatgtctagaacggcaattgttttacgtccagttaacactttcgttgatttaaagtctagagtctttgcaaacataatatccttatccgactttatatttcctgtagggtggtataattttattttgcctccacatatcggtgtttccaaatatattactagacaatattccatatagttattagttaagggtacccaattagaacacgtacgcttattatcatcatttggatcgtatttcataaaagttattgtgttatcgatgtcaacacattctacattttttaatcgtctatatagtatttttctgatattttctataatatcagaattgtcttccatcggaagttgtatactatcggaatcagttacatgtttaaataattctctgatgtcattccttatacaatcaaattcattattaaacagtttaatagtctgtagacctttatcgtcgtaaatatccattgtcttattagttacgcttatttttatgtgtttttacgttgctttattatattttataagaatgattgtttgacgaatcacgagaactattaagacacattattaggtatatattataaaaaagtttttgattacgatgttataagaggaaagaggacacattaacatcatacatcaattaactacattcttataacatcgtaatcaaaagaattgcaattttgatgtataacaactgtcaatgggttatggaattgtatattacatattatacggtatgttggtaacgacaaataccggtcggtaattgtctgccggtgtaatagaattatatatatctatctattacaccggccttgtatacataataataagttgtggtagtatgatctccatatttataatttaggactttgtattcagtatttttggaatcataaaaaataaaaaaaagttttactaatttaaaatttaaaaagtatttacatttttttcactgtttagtcgcggatatggaattcgatcctgccaaaatcaatacatcatctatagatcatgtaacaatattacaatacatagatgaaccaaatgatataagactaacagtatgcattatccgaaatattatatcaatatcacaaaaataaatacacatttggctaatcaatttcgggcttggaaaaaacgtatcgccggaagggactatatgactaacttatctagagatacaggaatacaacaatcaaaacttactgaaactatacgtaactgtcaaaaaaatagaaacatatatggtctatatatacactacaatttagttattaattggataaccgatgtgattatcaatcaatattaagagggttggtaaattggtacatagctaataatacctatactccaaatacacccaataatacaacaaccatttctgagttggatatcatcaaaatactaaataaatacgaggacgtgtatagagtaagtaaagaaaaagaatgtggaatttgctatgaagttgtttactcaaaacgatagatactttggtttattggattcgtgtactcatatattttgcataacatgcatcaatatatggcatagaacacgaagagaaaccggtgcgtcggataattgtcctatatgccgtacccgttttagaaacataacaatgagcaagttctataagctagttaactaataaataaaaagtttaatttgttgacgacgtatgtcgttattttttctcgtataaaagattaatttgattctaatataatctttagtattggataaatatcaattcaaattaattccattagattatatcataaataaaaatagtagcacacaactacttcagcaaacattctttttataaatgccatctagcgtagcgaggacacaagtgaacctataattatcaaatttattagtatcagtcacatgaaggactttacgtagagtgacgattccactatctgtggtacgaacggtttcatcttctttgatgccatcacccagatgttctataaacttggtatcctcgtccgatttcatatcctttgccaaccaatacatatagctaaactcaggcatatgttccacacatcctgaacaatgaaattctccagaagatgttacaatgtctagatttggacatttggtttcaaccgcgttaacatatgagtgaacacacccatacatgaaagcgatgagaaataggattctcatcttgccaaaatatcactagaaaaaatttatttatcagttttaaaggtataaaaaatacttattgttgctcgaatattttgtatttgatggtatacggaagattagaaatgtaggtattatcatcaactgattctatggttttatgtattctatcatgtttcactattgcgttggaaataatatcatatgcttccacatatattttattttgttttaactcataatactcacgtaattctggattattggcatatctatgaataattttagctccatgatcagtaaatattaatgagaacatagtattaccacctaccattatttttttcatctcattcaattcttaattgcaaagatctatataatcattatagcgttgacttatggactctggaatcttagacgatgtacagtcatctataatcatggcatatttaatacattgttttatagcatagtcgttatctacgatgttagatatttctctcaatgaatcaatcacacaatctaatgtaggtttatgacataatagcattttcagcagttcaatgtttttagattcgttgatggcaatggctatacatgtatatccgttatttgatctaatgttgacatctgaaccggattctagcagtaaagatactagagattgtttattatatctaacagccttgtgaagaagtgtttctcctcgtttgtcaatcatgttaatgtctttaagataaggtaggcaaatgtttatagtactaagaattgggcaagcataagacatgtcacaaagacccttttttgtatgtataagtgtaaaaattataacatccatagttggatttacataggtgtccaatcgggatctctccatcatcgagataattgatggcatctcccttccttttttagtagatatttcatcgtgtaagaatcaatattaatatttctaaagtatccgtgtatagcctctttatttaccacagctccatattccactagagggatatcgccgaatgtcatatactcaattagtatatgttggaggacatccgagttcattgttttcaatatcaaagagatggtttccttatcatttctccatagtggtacaatactacacattattccgtgcggctttccattttccaaaaacaatttgaccaaatctaaatctacatctttattgtatctataatcactatttagataatcagccataattcctcgagtgcaacatgttagatcgtctatatatgaataagcagtgttatctattcctttcattaacaatttaacgatgtctatatctatatgagatgacttaatataatattgaagagctgtacaatagtttttatctataaaagacggcttgattccgtgattaattagacatttaacaacttccggacgcacatatgctctcgtatccgactctgaatacagatgagagatgatatacagatgcaatacggtaccgcaatttcgtagttgataatcatcatacgcgtatcagtactcgtcctcataaagaacactgcagccattttctatgaacaaatcaataattttagaaacaggatcattgtcattacataattttctataactgaacgatggttttcacatttaacactcaagtcaaatccatgttctaccaacacctttatcaagtcaacgtctacatttttggatttcatatagctgaatatattaaagttatttatgttgctaaatccagtggcttctagtagagccatcgctatatccttattaactttaacatgtctactatttgtgtattcttctaatggggtaagctgtctccaatttttgcgtaatggattagtgccactgtctagtagtagtttgacgacctcgacattattacaatgctcattaaaaaggtatgcgtgtaaagcattattcttgaattggttcctggtatcattaggatctctgtctttcaacatctgtttaagttcatcaagagccacctcctcattttccaaatagtcaaacattttgactgaatgagctactgtgaactctatacacccacacaactaatgtcattaaatatcatgtcaaaaacttgtacaattattaataaaaataatttagtgtttaaattttaccagttccagattttacacctccgttaatacctccattaaccccactggacgatcctcctccccacattccaccgccaccagatgtataagttttagatcctttattactaccatcatgtccatggataaagacactccacatgccgccactaccccctttagaagacatattaataagacttaaggacaagtttaacaataaaattaatcacgagtaccctactaccaacctacactattatatgattatagtttctatttttacagtaccttgactaaagtttctagtcacaagagcaatactaccaacctacactattatatgattatagtttctatttttataggaacgcgtacgagaaaatcaaatgtctaatttctaacggtagtgttgataaacgattgttatccgcggatacctcctctatcatgtcgtctattttcttactttgttctattaacttattagcattatatattatttgattataaaacttatattgcttattagcccaatctgtaaatatcggattattaacatatcgtttctttgtaggtttatttaacatgtacatcactgtaagcatgtccttaccatttattttaatttgacgcatatccgcaatttctttttcgcagtcggttataaattctatatatgatggatacatgctacatgtgtacttataatcgactaatatgaagtacttgatacatattttcagtaacgatttattattaccacctatgaataagtacctgtgatcgtctaggtaatcaactgttttcttaatacattcgatggttggtaatttactcagaataatttccaatatcttaatatataattctgctatttctgggatatatttatctgccagtataacacaaatagtaatacatgtaaacccatattttgttattatattaatgtctgcgccattatctattaaccattctactaggctgacactatgcgactcaatacaatgataaagtatactacatccatgtttatctattttgtttatatcatcaatatacggcttacaaagttttagtatcgataacacatccaactcacgcatagagaaggtagggaataatggcataatatttattaggttatcatcattgtcattatctacaactaagtttccattttttaaaatatactcgacaactttaggatctctattgccaaatttttgaaaatatttatttatatgcttaaatctatataatgtagctccttcatcaatcatacatttaataacattgatgtatactgtatgataagatacatattctaacaatagatcttgtatagaatctgtatatcttttaagaattgtggatattaggatattattacataaactattacacaattctaaaatataaaacgtatcacggtcgaataatagttgatcaactatataattatcgattttgtgatttttcttcctaaactgtttacgtaaatagttagatagaatattcattagttcatgaccactatagttactatcgaataacgcgtcaaatatttcccgtttaatatcgcatttgtcaagataataatagagtgtggtatgttcacgataagtataataacgcatctctttttcgtgtgaaattaaatagtttattacgtccaaagatgtagcataaccatcttgtgacctagtaataatataataatagagaactgttttacccattctatcatcataatcagtggtgtagtcgtaatcgtaatcgtctaattcatcatcccaattataatattcaccagcacgtctaatctgttctattttgatcttgtatccatactgtatgttgctacatgtaggtattcctttatccaataatagtttaaacacatctacattgggatttgatgttgtagcgtatttttctacaatattaataccatttttgatactatttatttctatacctttcgaaattagtaatttcaataagtctatattgatgttatcagaacatagatattcgaatatatcaaaatcattgatatttttatagtcgactgacgacaataacaaaatcacaacatcgtttttgatattattatttttcttggtaacgtatgcctttaatggagtttcaccatcatactcatataatggatttgcaccactttctatcaatgattgtgcactgctggcatcgatgttaaatgttttacaactatcatagagtatcttatcgttaaccatgattggttgttgatgctatcgcattttttggtttctttcatttcagttatgtatggatttagcacgtttgggaagcatgagctcatatgatttcagtactgtagtgtcagtactattagtttcaataagatcaatctctagatctatagaatcaaaacacgataggtcagaagataatgaatatctgtaggcttcttgttgtactgtaacttctggttttgttagatggttgcatcgtgctttaacgtcaatggtacaaattttatcctcgctttgtgtatcatattcgtccctactataaaattgtatattcagattatcatgcgatgtgtatacgctaacggtatcaataaacggagcacaccatttagtcataaccgtaatccaaaaatttttaaagtatatcttaacgaaagaagttgtgtcattgtctacggtgtatggtactagatcctcataagtgtatatatctagagtaatgtttaatttattaaatggttgataatatggatcctcgtgacaatttccgaagatggaaataagacataaacacgcaataaatctaattgcggacatggttactccttaaaaaaatacgaataatcaccttggctatttagtaagtgtcatttaacactatactcatattaatccatggactcataatctctatacgggattaacggatgttctatatacggggatgagtagttctcttctttaactttatactttttactaatcatatttagactgatgtatgggtaatagtgtttgaagagctcgttctcatcatcagaataaatcaatatctctgtttttttgttatacagatgtattacagcctcatatattacgtaatagaacgtgtcatctaccttattaactttcaccgcatagttgtttgcaaatacggttaatcctttgacctcgtcgatttccgaccaatctgggcgtataatgaatctaaactttaattgcttgtaatcattcgaaataatttttagtttgcatccgtagttatcccctttatgtaactgtaaatttctcaacgcgatatctccattaataatgatgtcgaattcgtgctgtatacccatactgaatggatgaacgaataccgacggcgttaatagtaatttactttttcatctttacatattgggtactagttttactatcataagtttataaattccacaagctactatggaataagccaaccatcttagtataccacacatgtcttaaagtttattaattaattacatgttgttttatatatatcgctacgaatttaaagagaaattagtttaggaagaaaaattatctatctacatcatcacgtctctgtattctacgatagagtgctactttaagatgcgacagatccgtgtcatcaaatatatactccattaaaatgattattccggcagcgaacttgatattggatatatcacaacctttgttaatatctacgacaatagacagcagtcccatggttccataaacagtgagtttatctttctttgaagagatattttgtagagatcttataaaactgtcgaatgacatcgcatttatatctttagctaaatcgtatatgttaccatcgtaatatctaaccgcgtctatcttaaacgtttccatcgctttaaagacgtttccgatagatggtctcatttcatcagtcatactgagccaacaaatataatcgtgtataacatctttgatagaatcagactctaaagaaaacgaatcggctttattatacgcattcatgataaacttaatgaaaaatgtttttcgttgtttaagttggatgaatagtatgtcttaataattgttattatttcattaattaatatttagtaacgagtacactctataaaaacgagaatgacataactaatcataactagttatcaaagtgtctaggacgcgtaattttcatatggtatagatcctgtaagcattgtctgtattctggagctattttctctatcgcattagtgagttcagaatatgttataaatttaaatcgaataacgaacataactttagtaaagtcgtctatattaactcttttattttctagccatcgtaataccatgtttaagatagtatattctctagttactacgatctcatcgttgtctagaatatcacatactgaatctacatccaattttagaaattggtctgtgttacatatctcttctatattattgttgatgtattgtcgtagaaaactattacgtagaccattttctttataaaacgaatatatagtactccaattatctttaccgatatatttgcacacataatccattctctcaatcactacatctttaagattttcgttgttaagatatttggctaaactatataattctattagatcatcaacagaatcagtatatatttttctagatccaaagacgaactctttggcgtcctctataatattcccagaaaagatattttcgtgttttagtttatcgagatctgatctgttcatatacgccatgattgtacggtacgttatgataaccgcataaaataaaaatccattttcatttttaaccaatactattcataattgagattgatgtaatactttgttactttgaacgtaaagacagtacacggatccgtatctccaacaagcacgtagtaatcaaatttggtgttgttaaacttcgcaatattcatcaatttagatagaaacttatactcatcatctgttttaggaatccatgtattattaccactttccaacttatcattatcccaggctatgtttcgtccatcatcgttgcgcagagtgaataattcttttgtattcggtagttcaaatatatgatccatgcatagatcggcaaagctattgtagatgtgatttttcctaaatctaatataaaactcgtttactagcaaacactttcctgatttatcgaccaagacacatatggtttctaaatctatcaagtggtggggatccatagttatgacgcagtaacatatattattacattcttgactgtcgctaatatctaaatatttattgttatcgtattggattctgcatatagatggcttgtatgtcaaagatatagaacacataaccaatttatagtcgcgctttacattctcgaatctaaagttaagagatttagaaaacattatatcctcggatgatgttatcactgtttctggagtaggatatattaaagtctttacagatttcgtccgattcaaataaatcactaaataatatcccacattatcatctgttagagtagtatcattaaatctattatattttatgaaagatatatcactgctcacctctatatttcgtacatttttaaactgtttgtataatatctctctgatacaatcagatatatctattgtgtcggtagacgataccgttacatttgaattaatggtgttccattttacaacttttaacaagttgaccaattcatttctaatagtatcaaactctccatgattaaatattttaatagtatccattttatatcactacggacacaaagtagctgacataaaccattgtataatttttatgttttatgtttattagcgtacacattttggaagttccggcttccatgtatttcctggagagcaagtagatgatgaggaaccagatagtttatatccgtacttgcacttaaagtctacattgtcgttgtatgagtatgatcttttaaacccgctagacaagtatccgtttgatattgtaggatgtggacatttaacaatctgacacgtgggtggatcggaccattctcctcctgaacacaggacactagagttaccaatcaacgaatatccactattgcaactataagttacaacgctcccatcggtataaaaatcctcgtatccgttatgtcttccgttggatatagatggaggggattggcatttaacagattcacaaataggtgcctcgggattccataccatagatccagtagatcctaattcacaatacgatttagattcaccgatcaactgatatccgctattacaagagtacgttatactagagccaaagtctactccaccaatatcaagttggccattatcgatatctcgaggcgatgggcatctccgtttaatacattgattaaagagtgtccatccagtacctgtacatttagcatatataggtcccattttttgctttctgtatccaggtagacatagatattctatagtgtctcctatgttgtaattagcattagcatcagtctccacactattcttaaatttcatattaatgggtcgtgacggaatagtacagcatgatagaacgcatcctattcccaacaatgtcaggaacgtcacgctctccaccttcatatttatttatccgtaaaaatgttatcctggacatcgtacaaataataaaaagcccatatatgttcgctattgtagaaattgtttttcacagttgctcaaaaacgatggcagtgacttatgagttacgttacactttggagtctcatctttagtaaacatatcataatattcgatattacgagttgacatatcgaacaaattccaagtatttgattttggataatattcgtattttgcatctgctataattaagatataatcaccgcaagaacacacgaacatctttcctacatggttaaagtacatgtacaattctatccatttgtcttccttaactatatatttgtatagataattacgagtctcgtgagtaattccagtaattacatagatgtcgccgtcgtactctacagcataaactatactatgatgtctaggcatgggagacttttttatccaacgatttttagtgaaacattccacatcgtttaatactacatatttctcatacgtggtataaactccacccattacatatatatcatcgtttacgaataccgacgcgcctgaatatctaggagtaattaagtttggaagtcttatccatttcgaagtgccgtgtttcaaatattctgccacacccgttgaaatagaaaattctaatcctcctattacatataactttccatcgttaacacaagtactaacttctgattttaacgacgacatattagtaaccgttttccattttttcgttttaagatctacccgcgatacggaataaacatgtctattgttaatcatgccgccaataatgtatagacaattatgtaaaacatttgcattatagaattgtctatctgtattaccgactatcgtccaatattctgttctaggagagtaatgggttattgtggatatataatcagagtttttaatgactactatattatgttttataccatttcgtgtcactggctttgtagatttggatatagttaatcccaacaatgatatagcattgcgcatagtattagtcataaacttgggatgtaaaatgttgatgatatctacatcgtttggatttttatgtatccactttaataatatcatagctgtaacatcctcatgatttacgttaacgtcttcgtgggataagatagttgtcagttcatcctttgataattttccaaattctggatcggatgtcaccgcagtaatattgttgattatttctgacatcgacgcattatatagttttttaattccatatcttttagaaaagttaaacatccttatacaatttgtgaaattaatattatgaatcatagtttttacacatagatctactacaggcggaacatcaattattatggcagcaactagtatcatttctacattgtttatggtgatgtttatcttcttccagcgcatatagtctaatagcgattcaaacgcgtgatagtttataccattcaatataatcgcttcatcctttagatggtgatcctgaatgcgtttaaaaaaattatacggagacgccgtaataatttccttattcacttgtataatttccccattgatagaaaatattacgctttccattcttaaagtactataagtaattatagtataatgtaaacgtttatatattcaatatttttataaaaatcattttgacattaattcctttttaaatttccgtctatcatctatagaaacgtattctatgaatttataaaatgcttttacgtgtcctatcgtaggcgatagaaccgctaaaaagcctatcgaatttctacaaaagaatctgttatatggtatagggagagtataaaacattaaatgtccgtacttattaaagtattcagtagccaatcctaactctttcgaatacttattaatggctcttgttctgtacgaatctatttttttgaacaacggacctagtggtatatcttgttctatgtatctaaaataatgtctgactagatccgttagtttaatatccgcagtcatcttgtctagaatggcaaatctaactgcgggtttaggctttagtttagtttctatatctacatctatgtctttatctaacaccaaaaatataatagctaatattttattacaatcatccggatattcttctacgatctcactaactaatgtttctttggttatactagtatagtcactatcggacaaataaagaaaatcagatgatcgatgaataatacatttaaattcatcatctgtaagatttttgagatgtctcattagaatattattagggttagtactcattatcattcggcagctattacttattttattatttttcaccatatagatcaatcattagatcatcaaaatatgtttcaatcatcctaaagagtatggtgaatgactcttcccatctaatttctgaacgttcaccaatgtctctagccactttggcactaatagcgatcattcgcttagcgtcttctatattattaactggttgatttaatctatctagcaatggaccgtcggacagcgtcattctcatgttcttaatcaatgtacatacatcgccgtcatctaccaattcatccaacaacataagctttttaaaatcatcattataataggtttgatcgttgtcatttctccaaagaatatatctaataagtagagtcctcatgcttagttaacaactattttttatgttaaatcaattagtacaccgctatgtttaatacttattcatattttagtttttaggattgagaatcaatacaaaaattaatgcatcattaattttagaaatacttagtttccacgtagtcaatgaaacatttgaactcatcgtacaggacgttctcgtacaggacgtaactataaaccggtttatatttgttcaagatagatacaaatccgataactttttttacgaattctacgggatccactttaaaagtgtcataccgggttctttttatttttttaaacagatcaatggtgtgatgttgattaggtcttttacgaatttgatatagaatagcgtttacatattctccataatggtcaatcgccatttgttcgtatgtcataaattctttaattatatgacactgtgtattatttagttcatccttgttcattgttaggaatctatccaaaatggcaattatactagaactataggtgcgttgtatacacatattgatgtgtctgtttatacaatccatgatatttggatccatgctactaccttcgggtaaaattgtagcatcatataccatttctagtactttaggttcattattatccattgcagaggacgtcatgatcgaatcataaaaaaatatattatttttatgttattttgttaaaaataatcatcgaatacttcgtaagatactccttcatgaacataatcagttacaaaacgtttatatgaagtaaagtatctacgatttttacaaaagtccggatgcataagtacaaagtacgcgataaacggaataataatagatttatctagtctatctttttctatagctttcatagttagatacatggtctcagaagtaggattatgtaacatcagcttcgataaaatgactgggttatttagtcttacacattcgctcatacatgtatgaccgttaactacagagtctacactaaaatgattgaacaatagatagtctaccattgtttcgtattcagatagtacagcgtagtacatggcatcttcacaaattatatcattgtctaatagatatttgacgcatcttatggatcccacttcaacagccatcttaaaatcatattgctttcctttatcattaataatttctagaacatcatctctatcataaaagatacaaatattaactgtttgatccgtaataacattgctagtcaatagcaatttgttaataagatgcgctgggctcaatgtcttaataagaagtgtaagaggactatctccgaatttgttttgtttattaacatccgttgatggaagtaaaagatctataatgtctacattcttgactgttttagagcatacaatatggagaggtgtatttccatcatgatctggttttgagggactaattcctagtttcatcatccatgagattgtagaagcttttggattgtctgacataagatgtctatgaatatgatttttgccaaatttatccactatcctggcttcgaatccgatggacattatttttttaaacactctttctgaaggatctgtacacgccaacaacggaccacatccttcttcatcaaccgagttgttaatcttggctccatactgtaccaataaatttattctctctatgacttcatcatctgttcccgagagataatatagaggtgttttatgctgtttatcacacgcgtttggatctgcgccgtgcgtcagcagcatcgcgactattctattattattaattttagaagctatatgcaatggataatttccatcatcatccgtctcatttggagagtatcctctatgaagaagttcttcgacaaatcgttcatctagtcctttaattccacaatacgcatgtagaatgtgataattatttccagaaggttcgatagcttgtagcatattcctaaatacatctaaatttttactattatatttggcataaagagatagataatactcggccgacataatgttgtccattgtagtataaaaattaatatttctatttctatttctgtatatttgcaacaatttactctctataacaaatatcataacttagtttttttatgtcaagaaggcactggtttagttcatctataaatgtcacgccataactaccacgcatgccatactcagaattatgataaagatatttatccttggggtgtaggtaatggggattaatctttgttggatcagtctctaagttaacacatgtcacacatgatccatttatagttatatcacacgatgatgatttatgaattgattccggaagatcgctatcgtattttgtggttccacaattcatttccatacatgttattgtcacactaatattatgatgaactttatctagccgctgagtggtaaacaacagaacagatagtttattatctttaccaacaccctcagccgctgccacaaatctctgatccgtatccatgatggtcatgtttatttctagtccgtatccagtcaacactatgttagcatttctgtcgatatagctttcactcatatgacactcaccaataatagtagaattaatgtcgtaatttacaccaatagtgagttcggcggcaaagtaccaataccggtaatcttgtcgaggaggacatatagtattcttgtattctaccgaatacccgagagatgcgatacaaaagagcaagactaatttgtaaaccatcttactcaaaatatgtaacaatagtacgatgcaatgagtaagacaataggaaatctatcttatatacacataattattctatcaattttaccaattagttagtgtaatgttaacaaaaatgtgggagaatctaattagtttttctttacacaattgacgtacatgagtctgagttccttgtttttgctaattatttcatccaatttattattcttgacgatatcgagatcttttgtataggagtcaaacttgtattcaacatgcttttctataatcattttagctatttcggcatcatccaatagtacattttccagattagcagaatagatattaatgtcgtatttgaacagagcctgtaacatctcaatgtctttattatctatagccaatttaatgtccggaatgaagagaagggaattattggtgtttgtcgacgtcatatagtcgagcaagagaatcatcatatccacgtgtccattttttatagtgatgtgaatacaactaaggagaatagccagatcaaaagtagatggtatctctgaaagaaagtaggaaacaatacttacatcattaagcatgacggcatgataaaatgaagttttccatccagttttcccatagaacatcagtctccaatttttcttaacaaacagttttaccgtttgcatgttaccactatcaaccgcataatacaatgcggtgtttcccttgtcatcaaattgtgaatcatccagtccactgaatagcaaaatctttactattttggtatcttccaatgtggctgcctgatgtaatggaaattcattctctagaagatttttcaatgctccagcgttcaacaacgtacatactagacgcacgttattatcagctattgcataatacaaggcactatgtccatggacatccgccttaaatgtatctttactagagagaaagcttttcagctgcttagacttccaagtattaattcgtgacagatccatgtctgaaacgagacgctaattagtgtatattttttcattttttataattttgtcatattgcaccagaattaataatatctttaatagatctgattagtagatacatggctatcgcaaaacaacatatacacatttaataaaaataatatttattaagaaaattcagatttcacgtacccatcaatataaataaaataatgattccttacaccgtacccatattaaggagattccaccttacccataaacaatataaatccagtaatatcatgtctgatgatgaacacaaatggtgtattaaattccagtttttcaggagatgatctcgccgtagctaccataatagtagatgcctctgctacagttccttgttcgtcgacatctatctttgcattctgaaacattttataaatatataatgggtccctagtcatatgtttaaacgacgcattatctggattaaacatactaggagccatcatttcggctatcgacttaatatccctcttattttcgatagaaaatttagggagtttaagattgtacactttattccctaattgagacgaccaatagtctaattttgcagccgtgatagaatctgtgaaatgggtcatattatcacctattgccaggtacatactaatattagcatccttatacggaaggcgtaccatgtcatattctttgtcatcgattgtgattgtatttccttgcaatttagtaactacgttcatcatgggaaccgttttcgtaccgtacttattagtaaaactagcattgcgtgttttagtgatatcaaacggatattgccatatacctttaaaatatatagtattaatgattgcccatagagtattattgtcgagcatattagaatctactacattagacataccggatctacgttctactatagaattaattttattaaccgcatctcgtctaaagtttaatctatataggccgaatctatgatattgttgataatacgacggtttaatgcacacagtattatctacgaaactttgataagttagatcagtgtacgtatatttagatgttttcagcttagctaatcctgatattaattctgtaaatgctggacccagatctctttttctcaaatccatagtcttcaataattctattctagtattacctgatgcaggcaatagcgacataaacatagaaaacgaataaccaaacggtgagaagacaatattatcatcttgaatatttttatacgctactataccggcattggtaaatccttgtagacgataggcggacgctgaacacgctaacgatagtatcaataacgcaatcatgattttatggtattaataattaaccttatttttatgttcggtataaaaaaattattgatgtctacacatccttttgtaattgacatctatatatccttttgtataatcaactctaatcactttaacttttacagttttccctaccagtttatccctatattcaacatatctatccatatgcatcttaacactctctgccaagatagcttcagagtgaggatagtcaaaaagataaatatatagagcataatcattctcgtatactctgccctttattacatcacccgcattgggcaacgaataacaaaatgcaagcatcttgttaacgggctcgtaaattgggataaaaattatgtttttattgtcttatatctattttattcaagagaatattcaggaatttctttttccggttgtatctcgtcgcagtatatatcatttgtacattgtttcatattttttaatagtttacaccttttagtaggactagtatcgtacaattcatagctgtattttgaattccaatcacgcataaaaatatcttccaattgttgacgaagacctaatccatcatccggtgtaatattaatagatgctccacatgtatccgtaaagtaatttcctgtccaatttgaggtacctatataggccgttttatcggttaccatatatttggcatggtttaccctagaatacggaatgggaggatcagcatctggtacaataaatagctttacttctatatttatgtttttagattttagcatagcgatagatcttaaaaagtttctcatgataaacgaagatcgttgccagcaactaatcaatagcttaacggatacttgtctgtctatagcggatcttcttaattcatcttctatataaggccaaaacaaaattttacccgccttcgaataaataatagggataaagttcataacagatacataaacgaatttactcgcatttctaatacatgacaataaagcggttaaatcattggttctttccatagtacatagttgttgcggtgcagaagcaataaatacagagtgtggaacgccgcttacgttaatactaagaggatgatctgtattataatacgacggataaaagtttttccaattatatggtagattgttaactccaagataccagtatacctcaaaaatttgagtgagatccgctgccaagttcctattattgaagatcgcaatacccaattccttgacctgagttagtgatctccaatccatgttagcgcttcctaaataaatatgtgtattatcagatatccaaaattttgtatgaagaactcctcctaggatatttgtaatatctatgtatcgtacttcaactccggccatttgtagtctttcaacatcctttaatggtttgttagatttattaacggctactctaactcgtactcctcttttgggtaattgtacaatctcgtttaatattatcgtgccgaaattcgtacccacttcatccgataaactccaataaaaagatgatatatctagtgtttttgtggtattggatagaatttccctccacatgttaaatgtagacaaatatactttatcaaattgcatacctataggaatagtttctgtaatcactgcgattgtattatccggattcattttatttgttaaaagaataatcctatatcacttcactctattaaaaatccaagtttctatttctttcatgactgattttttaacttcatccgtttccttatgaagatgatgtttggcaccttcataaatttttatttctctattacaatttgcatgttgcatgaaataatatgcacctaaaacatcgctaatcttattgtttgttccctggagtatgagagtcggggggtgttaatcttggaaattatttttctaaccttgttggtagccttcaagacctgactagcaaatccagccttaattttttcatgattgactaatgggtcgtattggtatttataaactttatccatatctctagatactgattctggacatagctttccgactggcgcatttggtgtgatggttcccataagtttggcagctagcagattcagtcttgaaacagcatctgcattaactagaggagacattagaatcattgctgtaaacaagtttggattatcgtaagaggctagctcccatggaatgacccaataagtagatttaatagttaccacgtgctgtaccaaagtcatcaatcatcattttttcaccattacttcttccatgtccaatatgatcatgtgagaatactaaaattcctaacgatgatatgttttcagctagttcgtcataacgtccagaatgtttaccagctccatgacttatgaatactaatgccttaggatatgtaataggtttccaatatttacaatatatgtaatcattgtccagattgaacatacagtttgcactcatgattcacgttatataactatcaatattaacagttcgtttgatgatcatattatttttatgttttattgataattgtaaaaacatacaattaaatcaatatagaggaaggagacggctactgtcttttgtaagatagtcatggcgactaaattagattatgaggatgctgttttttactttgtggatgatgataaaatatgtagtcgcgactccatcatcgatctaatagatgaatatattacgtggagaaatcatgttatagtgtttaacaaagatattaccagttgtggaagactgtacaaggaattgatgaagttcgatgatgtcgctatacggtactatggtattgataaaattaatgagattgtcgaagctatgagcgaaggagaccactacatcaattttacaaaagtccatgatcaggaaagtttattcgctaccataggaatatgtgctaaaatcactgaacattggggatacaaaaagatttcagaatctagattccaatcattgggaaacattacagatttgatgaccgacgataatataaacatcttgatactttttctagaaaaaaaattgaattgatgatataggggtcttcataacgcataattattacgttagcattctatatccgtgttaaaaaaaattatcctatcatgtatttgagagttttatatgtagcaaacatgatagctgtgatgccaataagctttagatattcacgcgtgctagtgttagggatggtattatctggtggtgaaatgtccgttatataatctacaaaacaatcatcgcatatagtatgcgatagtagagtaaacatttttatagtttttactggattcatacatcgtctacccaattcggttataaatgaaattgtcgccaatcttacacccaaccccttgttatccattagcatagtattaacttcgttatttatgtcataaactgtaaatgattttgtagatgccatatcatacatgatattcatgtccctattataatcattactaactttatcacaatatatgttgataatatctatatatgatctagtctttgtgggcaactgtctatacaagtcgtctaaacgttgtttactcatatagtatcgaacagccatcattacatggtcccgttccgttgatagataatcgagtatgttagtggacttgtcaaatctatataccatattttctggaagtggatatacatagtcgtgatcaacattattgctagcctcatcttctatatcctgtactataccattatctatatcatctacataatctatgatattattacacataaacatcgacaacatactattgtttattatctaagtcctgttgatccaaacccttgatctcctctatttgtactatctagagattgtacttcttccagttctggataatatatacgttgatagattagctgagctattctatctccagtatttacattaaacgtacattttccattattaataagaatgactcctatgtttcccctataatcttcgtctattacaccacctcctatatcaatgccttttagtgacagaccagacctaggagctattctaccatagcagaacttaggcatggacatactaatatctgtcttaattaactgtctttctcctggagggatagtataatcgtaagcgctatacaaatcatatccggcagcacccggcgattgcctagtaggagatttagctctgttagtttccttaacaaatctaactggtgagttaatattcatgttgaacataaaactaatattttatttcaaaattatttaccatcccatatattccatgaataagtgtgatgattgtacacttctatagtatctatatacgatccacgataaaatcctcctatcaatagcagtttattatccactatgatcaattctggattatccctcggataaataggatcatctatcagagtccatgtattgctggattcacaataaaattccgcatttctaccaaccaagaataaccttctaccgaacactaacgcgcatgatttataatgaggataataagtggatggtccaaactgccactgatcatgattgggtagcaaatattctgtagttgtatcagtttcagaatgtcctcccattacgtatataacattgtttatggatgccactgctggattacatctaggtttcagaagactcggcatattaacccaagcagcatccccgtggaaccaacgctcaacagatgtgggatttggtagacctcctactacgtataatttattgttagcgggtatcccgctagcatacagtctggggctattcatcggaggaattggaatccaattgtttgatatataatttacagctatagcattgttatgtatttcattgttcatccatccaccgatgagatatactacttctccaacatgagtacttgtacacatatggaatatatctataatttgatccatgttcataggatactctatgaatggatacttgtatgatttgcgtggttgtttatcacaatgaaatattttggtacagtctagtatccattttacattatttatacctctgggagaaagataatttgacctgattacatttttgataaggagtagcagatttcctaatttatttcttcgcctcatataccacttaatgacaaaatcaactacataatcctcatctggaacatttagttcatcgctttctagaataagtttcatagatagataatcaaaattgtctatgatgtcatcttccagttccaaaaagtgtttggcaataaagtttttagtatgacataagagattggatagtccgtattctatacccatcatgtaacactcgacacaatattcctttctaaaatctcgtaagataaagtttatacaagtgtagatgataaattctacagaggttaatatagaagcacgtaataaattgacgacgttatgactatctatatatacctttccagtatatgagtaaataactatagaagttaaactgtgaatgtcaaggtctagacaaacccttgtaactggatctttatttttcgtgtatttttgacgtaaatgtgtgcgaaagtaaggagataactttttcaatatcgtagaattgactattatattgcctcctatggcatcaataattgttttgaatttcttagtcatagacaatgctaatatattcttacagtacacagtattgacaaatatcggcatttatgtttctttaaaagtcaacatctagagaaaaatgattatctttttgagacataactcccattttttggtattcacccacacgtttttcgaaaaaattagtttttccttccaatgatatattttccatgaaatcaaacggattggtaacattataaatttttttaaatcccaattcagaaatcaatctatccgcgacgaattctatatatgttttcatcatttcacaattcattcctataagtttaactggaagagccgcagtaagaaattcttgttcaatggatactgcatctgttataatagatctaacggtttcttcactcggtggatgcaataaatgtttaaacatcaaacatgcgaaatcgcagtgcagaccctcgtctctactaattagttcgttggaaaacgtgagtccgggcattaggccacgctttttaagccaaaatatggaagcgaatgatccagaaaagaaaattccttctactgcagcaaaggcaataagtctctctccataaccggcgctgtcatgtatccacttttgagcccaatcggccttcttttttacacaaggcatcgtttctatggcattaaagagatagtttttttcattactatctttaacataagtatcgatcaaaagactatacatttccgaatgaatgttttcaatggccatctgaaatccgtagaaacatctagcctcggtaatctgtacttctgtacaaaatcgttccgccaaattttcattcactattccgtcactggctgcaaaaaacgccaatacatgttttataaaatatttttcgtctggtgttagtttattccaatcattgatatctttagatatatctacttcttccactgtccaaaatgatgcctctgcctttttatacatgttccagatgtcatgatattggattgggaaaataacaaatctatttggatttggtgcaaggatgggttccataactaaattaacaataacaataaattttttttcagttatctatatgcctgtacttggattttttgtacatcgatatcgccgcaatcactacaataattacaagtattattgatagcattgttattagtactatcataattaaattatctacattcatgggtgctgaataatcgttattatcatcattatcattttgtaattgtgacatcatactagataaatcgtttgcgagattgttgtgggaagcgggcatggaggatgcattatcattattatttaacgccttccatttggattcacaaatgttacgcacattcaacattttatggaaactataattttgtgaaaacaaataacaagaaaactcgtcatcgttcaaatttttaacgatagtaaaccgattaaacgtcgagctaatttctaacgctagcgactctgttggatatgggtttccagatatatatcttttcagttcccctacgtatctataatcatctgtaggaaatggaagatatttccatttatctactgttcctaatatcatatgtggtggtgtagtagaaccattaagcgcgaaagatgttatttcgcatcgtattttaacttcgcaataatttctggttagataacgcactctaccagtcaagtcaatgatattagcctttacagatatattcatagtagtcgtaacgatgactccatcttttagatgcgatactcctttgtatgtaccagaatcttcgtacctcaaactcgatatatttaaacaagttaatgagatattaacgcgttttatgaatgatgatatataaccagaagttttatcctcggtggctagcgctataaccttatcattataataccaactagtgtgattaatatgtgacacgtcagtgtgggtacaaatatgtacattatcgtctacgtcgtattcgatacatccgcatacagccaacaaatataaaatgacaaatactctaacgccgttcgtacccatcttgatgcggtttaataaatgttttgatttcaatttattgtaaaaaaagattcggttttatactgttcgatattctcattgcttatattttcatctatcatctccacacagtcaaatccgtggttagcatgcacctcatcaaccggtaaaagactatcggactcttctatcattataactctagaatatttaatttggtcattattaatcaagtcaattatcttatttttaacaaacgtgagtattttactcattttttataaaaacttttagaaatatacagactctatcgtgtgtctatatcttctttttatatccaatgtatttatgtctgatttttcttcatttatcatatataatggtccaaattctacacgtgcttcggattcatccagatcattaaggttcttataattgtaacatccttctcttccctcttctacatcttccttcttattcttattcttagcgtcacagaatctaccacagcaggatcccatgacgagcgtcatattaaactaatccattttcaattataatatatgattagtaatgaccattaaaataaaaaatattcttcataaccggcaagaaagtgaaaagttcacattgaaactatgtcagtagtatacatcatgaaatgatgatatatatatactctattttggtggaggattatatgatataattcgtggataatcatttttaagacacatttctttattcgtaaatcttttcacgttaaatgagtgtccatattttgcaatttcttcatatgatggcggtgtacgtggacgaggctgctcctgttcttgttgtggtcgccgactgtcgtgtctgcgtttagatccctccattatcgcgattgcgtagatggagtactattttataccttgtaattaaatttttttattaattaaacgtataaaaacgttccgtatctgtatttaagagccagatttcgtctaatagaacaaatagctacagtaaaaataactagaataattgctacacccactagaaaccacggatcgtaatacggcaatcggttttcgataataggtggaacgtatattttatttaaggacttaacaattgtctgtaaaccacaatttgcttccgcggatcctgtattaactatctgtaaaagcatatgttgaccgggcggagccgaacattctccgatatctaatttctgtatatctataatattattaacctccgcatacgcattacagttcttttctagcttggataccgcactaggtacatcgtctagatctattcctatttcctcagcgatagctcttctatccttttccggaagcaatgaaatcacttcaataaatgattcaaccatgagtgtgaaactaagtcgagaattactcatgcatttgttagttattcggagcgcgcaatttttaaactgtcctataacctctcctatatgaatagcacaagtgacattagtagggatagaatgttgagctaatttttgtaaataactatctataaaaagattatacaaagttttaaactctttagtttccgccatttatccagtctgagaaaatgtctctcataataaatttttccaagaaactaattgggtgaagaatggaaacctttaatctatatttatcacagtctgttttggtacacatgatgaattcttccaatgccgtactaaattcgatatctttttcgatttctggatatgtttttaataaagtatgaacaaagaaatggaaatcgtaataccagttatgtttaactttgaaattgttttttattttcttgttaatgattccagccacttgggaaaagtcaaagtcgtttaatgccgatttaatacgttcattaaaaacaaactttttatcctttagatgaattattattggttcattggaatcaaaaagtaagatattatcgggtttaagatctgcgtgtaaaaagttgtcgcaacagggtagttcgtagattttaatgtataacagagccatctgtaaaaagataaactttatgtattgtaccaaagatttaaatcctaatttgatagctaactcggtatctactttatctgccgaatacagtgctaggggaaaaattataatgtttcctctttcatattcgtagttagttctcttttcatgttcgaaaaagtgaaacatgcggttaaaatagtttataacattaatattactgttaataactgccggataaaagtgggatagtaatttcacgaatttgatactgtcctttctctcgttaaacgcctttaaaaaaactttagaagaatatctcaatgagagttcctgaccatccatagtttgtatcaataatagcaacatatgaagaacacgtttatacagagtatgtaaaaatgttaatttatagtttaatcccatggcccacgcacacacgattaattttttttcatctccctttagattgttgtatagaaatttgggtactgtgaactccgccgtagtttccatgggactatataattttgtggcctcgaatacaaattttactacatagttatctatcttaaagactataccatatcctcctgtagatatgtgataaaaatcgtcgtttataggataaaatcgtttatccttttgttggaaaaaggatgaattaatgtaatcattctcttctatctttagtagtgtttccttattaaaattcttaaaataatttaacaatctaactgacggagcccaattttggtgtaaatctaattgggacattatattgttaaaatacaaacagtctcctaatataacagtatctgataatctatggggagacatccattgatattcaggggatgaatcattggcaacacccatttattgtacaaaaagccccaatttacaaacgaaagtccaggtttgatagagacaaacaattaactattttgtctctgtttttaacacctccacagtttttaatttctttagtaatgaaattattcacaatatcagtatcttctttatctaccagagattttactaacttgataaccttggctgtctcattcaatagggtagtaatatttgtatgtgtgatattgatatctttttgaattgtttcttttagaagtgattctttgatggtgccagcatacgaattacaataatgcagaaactcggttaacatgcaggaattatagtaagccaattccaattgttgcctgtgttgtattagagtgtcaatatgagcaatggtgtccttgcgtttctctgatagaatgcgagcagcgattttggcgttatcatttgacgatatttctggaatgacgaatcctgtttctactaactttttggtaggacaaagtgaaacaatcaagaagatagcttctcctcctatttgtggaagaaattgaactcctctagatgatctactgacgatagtatctccttgacagatattggaccgaattacagaagtacctggaatgtaaagccctgaaaccccctcattttttaagcagattgttgccgtaaatcctgcactatgcccaagatagagagctcctttggtgaatccatctctatgtttcagtttaaccaagaaacagtcagctggtctaaaatttccatctctatctaatacagcatctaacttgatgtcaggaactatgaccggtttaatgttatatgtaacattgagtaaatccttaagttcataatcatcactgtcatcagttatgtacgatccaaacaatgtttctaccggcatagtggatacgaagatgctatccatcagaatgtttccctgattagtattttctatatagctattcttctttaaacgattttccaaatcagtaactatgttcatttttttaggagtaggacgcctagccagtatggaagaggattttctagatcctctcttcaacatctttgatctcgatggaatgcaaaaccccatagtgaaacaaccaacgataaaaataatattgtttttcactttttataattttaccatctgactcatggattcattaatatctttataagagctactaacgtataattctttataactgaactgagatatatacaccggatctatggtttccataattgagtaaatgaatgctcggcaataactaatggcaaatgtatagaacaacgaaattatactagagttgttaaagttaatattttctatgagctgttccaataaattatttgttgtgactgcgttcaagtcataaatcatcttgatactatccagtaaaccgtttttaagttctggaatattatcatcccattgtaaagcccctaattcgactatcgaatatcctgctctgatagcagtttcaatatcgacggacgtcaatactgtaataaaggtggtagtattgtcatcatcgtgataaactacgggaatatggtcgttagtaggtacggtaactttacacaacgcgatatataactttccttttgtaccatttttaacgtagttgggacgtcctgcagggtattgttttgaagaaatgatatcgagaacagatttgatacgatatttgttggattcctgattattcactataatataatctagacagatagatgattcgataaatagagaaggtatatcgttggtaggataatacatccccattccagtattctcggatactctattgatgacactagttaagaacatgtcttctattctagaaaacgaaaacatcctacatggactcattaaaacttctaacgctcctgattgtgtctcgaatgcctcgtacaaggatttcaaggatgccatagattctttgaccaacgatttagaattgcgtttagcatctgatttttttattaaatcgaatggtcggctctctggtttgctaccccaatgataacaatagtcttgtaaagataaaccgcaagaaaatttatacgcatccatccaaataaccctagcaccatcggatgatattaatgtattattatagattttccatccacaattattgggccagtatactgttagcaacggtatatcgaatagattactcatgtaacctactagaatgatagttcgtgtactagtcataatatctttaatccaatctaaaaaatttaaaattagattttttacactgttaaagttaacaaaagtattacccgggtacgtggatatcatatatggcattggtccattatcagtaatagctccataaactgatacggcgatggtttttatatgtgtttgatctaacgaggaagaaattcgcgcccacaattcatctctagatatgtatttaatatcaaacggtaacacatcaatttcgggacgcgtatatgtttctaaatttttaatccaaatataatgatgacctatatgccctattatcatactgtcaactatagtacacctagggaacttacgatacatctgtttcctataatcgttaaattttacaaatctataacatgctaaaccttttgacgacagccattcattaatttctgatatggaatctgtattctcgataccgtatcgttctaaagccagtgctatatctccctgttcgtgggaacgctttcgtataatatcgatcaacggataatctgaagtttttggagaataatatgactcatgatctatttcgtccataaacaatctagacataggaattggaggcgatgatcttaattttgtgcaatgagtcgtcaatcctataacttctaatcttgtaatattcatcatcgacataatactatctatgttatcatcgtatattagtataccatgaccttcttcatttcgtgccaaaatgatatacagtcttaaatagttacgcaatatctcaatagtttcataattgttagctgttttcatcaaggtttgtatcctgtttaacatgatggcgttctataacgtctctattttctatttttaattttttaaatttttaacgatttactgtggctagatacccaatctctctcaaatatttttttagcctcgcttacaagctgtttatctatactattaaaactgacgaatccgtgattttggtaatgggttccgtcgaaatttgccgaagtgatatgaacatattcgtcgtcgactatcaacaattttgtattattctgaatagtgaaaaccttcacagatagatcattttgaacacacaacgcatctagacttttggcggttgccatagaatatacgtcgttcttatcccaattaccaactagaagtctgatcttaactcctctattaatggctgcttctataatggagttgtaaatgtcgggccaatagtagctattaccgtcgacacgtgtagtgggaactatggccaaatgttcaatatctatactagtcttagctgacctgagtttatcaataactacatcggtatctagatctctagaatatcccaataggtgttccggagaatcagtaaagaacactccacctataggattcttaatatgatacgcagtgctaactggcaaacaacaagccgcagagcataaattcaaccatgaattttttgcgctattaaaggctttaaaagtatcaaatcttctacgaagatctgtggccagcgggggataatcagaatatacacctaacgttttaatcgtatgtatagatcctccagtaaatgacgcgtttcctacataacatctttcatcatctgacacccaaaaacaaccgagtagtagtcccacattattttttttatctatattaacggttataaaatttatatccgggcagtgactttgtagctctcccagatttcttttccctcgttcatctagcaaaactattattttaatccctttttcagatgcctcttttagtttatcaaaaataagcgctcccctagtcgtactcagaggattacaacaaaaagatgctatgtatatatatttcttagctagagtgataatttcgttaaaacattcaaatgttgttaaatgatcggatctaaaatccatattttctggtagtgtttctaccagcctacattttgctcccgcaggtaccgatgcaaatggccacatttagttaacataaaaacttatacatcctgttctatcaacgattctagaatatcatcggctatatcgctaaaattttcatcaaagtcgacatcacaacctaactcagtcaatatattaagaagttccatgatgtcatcttcgtctatttctatatccgtatccattgtagattgttgaccgattatcgagtttaaatcattactaatactcaatccttcagaatacaatctgtgtttcattgtaaatttataggcggtgtatttaagttggtagattttcaattatgtattaatatagcaacagtagttcttgctcctccttgattctagcatcctcttcattattttcttctacgtacataaacatgtccaatacgttagacaacacaccgacgatggcggccgcagatctcgagttatgatctacttccttaccgtgcaataaattagaatatattttctacttttacgagaaattaattattgtatttattatttatgggtgaaaaacttactataaaaagcgggtgggtttggaattagtgaaagcttaaaaattgaaattttattttttttttttggaatataaataagctcgaagtcgacagatctaggcctggtaccaggaggaggaattcagcttaaagatgacttcgaaagtttatgatccagaacaaaggaaacggatgataactggtccgcagtggtgggccagatgtaaacaaatgaatgttcttgattcatttattaattattatgattcagaaaaacatgcagaaaatgctgttatttttttacatggtaacgcggcctcttcttatttatggcgacatgttgtgccacatattgagccagtagcgcggtgtattataccagatcttattggtatgggcaaatcaggcaaatctggtaatggttcttataggttacttgatcattacaaatatcttactgcatggtttgaacttcttaatttaccaaagaagatcatttttgtcggccatgattggggtgcttgtttggcatttcattatagctatgagcatcaagataagatcaaagcaatagttcacgctgaaagtgtagtagatgtgattgaatcatgggatgaatggcctgatattgaagaagatattgcgttgatcaaatctgaagaaggagaaaaaatggttttggagaataacttcttcgtggaaaccatgttgccatcaaaaatcatgagaaagttagaaccagaagaatttgcagcatatcttgaaccattcaaagagaaaggtgaagttcgtcgtccaacattatcatggcctcgtgaaatcccgttagtaaaaggtggtaaacctgacgttgtacaaattgttaggaattataatgcttatctacgtgcaagtgatgatttaccaaaaatgtttattgaatcggatccaggattcttttccaatgctattgttgaaggcgccaagaagtttcctaatactgaatttgtcaaagtaaaaggtcttcatttttcgcaagaagatgcacctgatgaaatgggaaaatatatcaaatcgttcgttgagcgagttctcaaaaatgaacaagcggccgccgccaccatgagcaagggcgaggaactgttcactggcgtggtcccaattctcgtggaactggatggcgatgtgaatgggcacaaattttctgtcagcggagagggtgaaggtgatgccacatacggaaagctcaccctgaaattcatctgcaccactggaaagctccctgtgccatggccaacactggtcactaccttcacctatggcgtgcagtgcttttccagatacccagaccatatgaagcagcatgactttttcaagagcgccatgcccgagggctatgtgcaggagagaaccatctttttcaaagatgacgggaactacaagacccgcgctgaagtcaagttcgaaggtgacaccctggtgaatagaatcgagctgaagggcattgactttaaggaggatggaaacattctcggccacaagctggaatacaactataactcccacaatgtgtacatcatggccgacaagcaaaagaatggcatcaaggtcaacttcaagatcagacacaacattgaggatggatccgtgcagctggccgaccattatcaacagaacactccaatcggcgacggccctgtgctcctcccagacaaccattacctgtccacccagtctgccctgtctaaagatcccaacgaaaagagagaccacatggtcctgctggagtttgtgaccgctgctgggatcacacatggcatggacgagctgtacaagtgagcggccgccctgctagcaagcttgctagcggccgctcgagatctgcggccgctacagacacgaatatgactaaaccgatgaccatttaaaaacccctctctagctttcacttaaactgtatcgatcattcttttagcacatgtataatataaaaacattattctatttcgaatttaggcttccaaaaatttttcatccgtaaaccgataataatatatatagacttgttaatagtcggaataaatagattaatgcttaaactatcatcatctccacgattagagatacaatatttacattctttttgctgtttcgaaactttatcaatacacgttaatacaaacccaggaaggagatattgaaactgaggctgttgaaaatgaaacggtgaatacaataattcagataatgtaaaatcatgattccgtattctgatgatattagaactgctaatggatgtcgatggtatgtatctaggagtatctattttaacaaagcatcgatttgctaatatacaattatccttttgattaattgttattttattcatattcttaaaaggtttcatatttatcaattcttctacattaaaaatttccatttttaatttatgtagccccgcaatactcctcattacgtttcattttttgtctataatatccattttgttcatctcggtacatagattatccaattgagaagcgcatttagtagttttgtacattttaagtttattgacgaatcgtcgaaaactagttatagttaacattttattatttgataccctgatattaatacccctgccgttactattatttataactgatgtaatccacgtaacattggaattaactatcgatagtaatgcatcgacgcttccaaaattgtctattataaactcaccgataatttttttattgcatgttttcatattcattaggattatcaaatctttaatcttattacgattgtatgcgttgatattacaagacgtcattctaaaagacggaggatctccatcaaatgccagacaatcacgtacaaagtacatggaaataggttttgttctattgcgcatcatagatttatatagaacacccgtagaaatactaatttgttttactctataaaatactaatgcatctatttcatcgttttgtataacgtctttccaagtgtcaaattccaaatttttttcattgatagtaccaaattcttctatctctttaactacttgcatagataggtaattacagtgatgcctacatgccgttttttgaaactgaatagatgcgtctagaagcgatgctacgctagtcacaatcaccactttcatatttagaatatatatatgtaaaaatatagtagaatttcattttgtttttttctatgctataaatgaattctcattttgcatctgctcatactccgttttatattaataccaaagaaggaagatatctggttctaaaagccgttaaagtatgcgatgttagaactgtagaatgcgaaggaagtaaagcttcctgcgtactcaaagtagataaaccctcatcgcccgcgtgtgagagaagaccttcgtccccgtccagatgcgagagaatgaataaccctggaaaacaagttccgtttatgaggacggacatgctacaaaatatgttcgcggctaatcgcgataatgtagcttctagacttttgtcctaaaatactattatatccttttcgatattaataaatccgtgtcgtccaggttttttatctctttcagtatgtgaatagataggtattttatctctattcatcatcgaatttaagagatccgataaacattgtttgtattctccagatgtcagcatctgatacaacaatatatgtgcacataaacctctggcacttatttcatgtaccttccccttatcactaaggagaatagtatttgagaaatatgtatacatgatattatcatgaattagatatacagaatttgtaacactctcgaaatcacacgatgtgtcggcgttaagatctaatatatcactcgataacacattttcatctagatacactagacattttttaaagctaaaatagtctttagtagtaacagtaactatgcgattattttcatcgatgatacatttcatcggcatattattacgcttaccatcaaagactataccatgtgtatatctaacgtattctagcatggttgccatacgcgcattaaacttttcaggatctttggatagatcttccaatctatctatttgagaaaacatttttatcatgttcaatagttgaaacgtcggatccactatatagatattatctataaagattttaggaactacgttcatggtatcctggcgaatattaaaactatcaatgatatgattatcgttttcatcttttatcaccatatagtttctaagatatgggattttacttaatataatattatttcccgtgataaattttattagaaaggccaaatctataagaaaagtcctagaattagtctgaagaatatctatatcgccgtatagtatatttggattaattagatatagagaatatgatccgtaacatatacaacttttattatggcgtctaagatattcttccatcaacttattaacatttttgactagggaagatacattatgacgtcccattacttttgccttgtctattactgcgacgttcatagaatttagcatatctcttgccaattcttccattgatgttacattataagaaattttagatgaaattacatttggagctttaatagtaagaactcctaatatgtccgtgtatgtggtcactaatacagattgtagttctataatcgtaaataatttacctatattatatgtttgagtctgtttagaaaagtagctaagtatacgatcttttatttctgatgcagatgtattaacatcggaaaaaaatctttttttattcttttttactaaagatacaaatatgtctttgttaaaaacagttattttctgaatatttctagcttgtaattttaacatatgatattcgttcacactaggtactctgcctaaataggtttctataatctttaatgtaatattaggaaaagtattctgatcaggattcctattcattttgaggatttaaaactctgattattgtctaatatggtctctacgcaaactttttcacagagcgatagagtttttgataactcgtttttcttaagaaatataaaactactgtctccagagctcgctctatcttttattttatctaattcgatacaaactcctgatactggttcagaaagtaattcattaattttcagtcctttatagaagatatttaatatagataatacaaaatcttcagtttttgatatcgatctgattgatcctagaactagatatattaataacgtgctcattaggcagtttatggcagcttgataattagatatagtatattccagttcatatttattagataccgcattgcccagattttgatattctatgaattcctctgaaaataaatccaaaataactagacattctattttttgtggattagtgtactctcttccctctatcatgttcactactggtgtccacgatgataaatatctagagggaatataatatagtccataggatgccaatctagcaatgtcgaataactgtaattttattcttcgctcttcattatgaattgattcttgaggtataaacctaacacaaattatattattagacttttcgtatgtaatgtctttcatgttataagtttttaatcctggaatagaatctattttaatgaggcttttaaacgcagagttctccaacgagtcaaagcataatactctgttgtttttcttatatacgatgttacgattttcttctttgaatggaataggtttttgaattagtttataattacaacataatagataaggaagtgtgcaaatagtacgcggaaaaaacataatagctcccctgttttcatccatggttttaagtaaatgatcactggcttctttagtcaatggatattcgaacattaaccgtttcatcatcattggacagaatccatatttcttaatgtaaagagtgatcaaatcattgtgtttattgtaccatcttgttgtaaatgtgtattcggttatcggatctgctcctttttctattaaagtatcgatgtcaatctcgtctaagaattcaactatatcgacatatttcatttgtatacacataaccattactaacgtagaatgtataggaagagatgtaacgggaacagggtttgttgattcgcaaactattctaatacataattcttctgttaatacgtcttgcacgtaatctattatagatgccaagatatctatataattattttgtaagatgatgttaactatgtgatctatataagtagtgtaataattcatgtattttgatatatgttccaactctgtctttgtgatgtctagtttcgtaatatctatagcatcctcaaaaaatatattcgcatatattcccaagtcttcagttctatcttctaaaaaatcttcaacgtatggaatataataatctattttacctcttctgatatcattaatgatatagtttttgacactatcttctgtcaattgattcttattcactatatctaagaaacggatagcgtccctaggacgaactactgccattaatatctctattatagcttctggacataattcatctattataccagaattaatgggaactattccgtatctatctaacatagttttaagaaagtcagaatctaagacttgatgttcatatattggttcatacatgaaatgatctctattgatgatagtgactatttcattctctgaaaattggtaactcattctatatatgctttccttgttgatgaaggatagaatatactcaatagaatttgtaccaacaaactgttctcttatgaatcgtatatcatcatctgaaataatcatgtaaggcatacatttaacaattagagacttgtctcctgttatcaatatactattcttgtgataatttatgtgtgaggcaaatttgtccacgttctttaattttgttatagtagatatcaaatccaatggagctacagttcttggcttaaacagatatagtttttctggaacaaattctacaacattattataaaggactttgggtagataagtgggatgaaatcctattttaattaatgcgatagccttgtcctcgtgcagatatccaaacgcttttgtgatagtatggcattcattgtctagaaacgctctacgaatatctgtgacagatatcatctttagagaatatactagtcgcgttaatagtactacaatttgtattttttaatctatctcaataaaaaaattaatatgtatgattcaatgtataactaaactactaactgttattgataactagaatcagaatctaatgatgacgtaaccaagaagtttatctactgccaatttagctgcattatttttagcatctcgtttagattttccatcggccttatcgaatactcttccgtcgatgtctacacaggcataaaatgtaggagagttactaggcccaactgattcaatacgaaaagaccaatctctcctagtaatttggcagtactcattaataacggtgacagggttagcatctttccaatcaataatttttttagccggaataacatcatcaaaagacttatgatcctctctcattgatttttcgcgggatacatcatctattatgacgtcagccatagcatcagcatccggcttatccgcctccgttgtcataaaccaacgaggaggaatatcgtcggagctgtacaccatagcactacgttgaagatcgtacagagctttattaacttctcgcttctccatattaagttgtctagttagttgtgcagcagtagctccttcgattccaatgtttttaatagccgcacacacaatctctgcgtcagaacgctcgtcaatatagatcttagacatttttagagagaactaacgcaaccagcaataaaactgaacctactttatcatttttttattcatcatcctctggtggttcgtcgttcctatcaaatgtagctctgattaacccgtcatctataggtgatgctggttctggagattctggaggagatggattattatctggaagaatctctgttatttccttgttttcatgtatcgattgcgttgtaacattaagattgcgaaatgctctaaatttgggaggcttaaagtgttgtttgcaatctctacacgcgtgtctaactagtggaggttcgtcagctgctctagtttgaatcatcatcggcgtagtattcctacttttacagttaggacacggtgtattgtatttctcgtcgagaacgttaaaataatcgttgtaactcacatcctttattttatctatattgtattctactcctttcttaatgcattttataccgaataagagatagcgaaggaattctttttcggtgccgctagtacccttaatcatatcacatagtgttttatattccaaatttgtggcaatagacggtttatttctatacgatagtttgtttctggaatcctttgagtattctataccaatattattctttgattcgaatttagtttcttcgatattagattttgtattacctatattcttgatgtagtactttgatgatttttccatggcccattctattaagtcttccaagttggcatcatccacatattgtgatagtaattctcggatatcagtagcggctaccgccattgatgtttgttcattggatgagtaactactaatgtatacattttccatttataacacttatgtattaactttgttcatttatattttttcattattatgttgatattaacaaaagtgaatatatatatgttaataattgtattgtggttatacggctacaattttataatgagtgaaagtcagtgtccgatgatcaatgacgatagctttactctgaaaagaaagtatcaaatcgatagtgcggagtcaacaataaaaatggataagaagaggataaagtttcagaatagagccaaaatggtaaaagaaataaatcagacaataagagcagcacaaactcattacgagacattgaaactaggatacataaaatttaagagaatgattatgactactactctagaagatatagcaccatctattccaaataatcagaaaacttataaactattctcggacatttcagccatcggcaaagcatcacagaatccgagtaagatggtatatgctctgctgctttacatgtttcccaatttgtttggagatgatcatagattcattcgttatagaatgcatccaatgagtaaaatcaaacacaagatcttctctcctttcaaacttaatcttattagaatattagtggaagaaagattctataataatgaatgcagatctaataaatggagaataattggaacacaagttgataaaatgttgatagctgaatctgataaatatacaatagatgcaaggtataacctaaaacccatgtatagaatcaagggagaatctgaagaagataccctctttatcaaacagatggtagaacaatgtgtgacatcccaggaattggtggaaaaagtgttgaagatactgtttagagatttgttcaagagtggagaatacaaagcgtacagatacgatgatgatgtagaaaatggatttattggattggatacactaaaattaaacattgttcatgatatagttgaaccatgtatgcctgttcgtaggccagtggctaagatactgtgtaaagaaatggtaaataaatactttgagaatccgctacatattattggtaaaaatcttcaagagtgcattgactttgttagtgaataggcatttcatctttctccaatactaattcaaattgttaaattaataatggatagtataaatagttattagttataagatagtaaaaataattattagaataagagtgtagtatcatagataactctcttctataaaaatggattttattcgtagaaagtatcttatatacacagtagaaaataatatagattttttaaaggatgatacattaagtaaagtaaacaattttaccctcaatcatgtactagctctcaagtatctagttagcaattttcctcaacacgttattactaaggatgtattagctaataccaatttttttgttttcatacatatggtacgatgttgtaaagtgtacgaagcggttttacgacacgcatttgatgcacccacgttgtacgttaaagcattgactaagaattatttatcgtttagtaacgcaatacaatcgtacaaggaaaccgtgcataaactaacacaagatgaaaaatttttagaggttgccgaatacatggacgaattaggagaacttataggcgtaaattatgacttagttcttaatccattatttcacggaggggaacccatcaaagatatggaaatcatttttttaaaactgtttaagaaaacagacttcaaagttgttaaaaaattaagtgttataagattacttatttgggcatacctaagcaagaaagatacaggcatagagtttgcggataatgatagacaaaatatatacactctatttcaacaaactggtagaatcgtccatagcaatctaacagaaacgtttagagattatatctttcccggagataagactagctattgggtgtggttaaacgaaagtatagctaatgatgcggatatcgttcttaatagacacgccattaccatgtatgataaaattcttagttatatatactctgagataaaacaaggacgcgttaataaaaacatgcttaagttagtttatatctttgagcctgaaaaagatatcagagaacttctgctagaaatcatatatgatattcctggagatatcctatctattattgatgcaaaaaacgacgattggaaaaaatattttattagtttttataaagctaattttattaacggtaatacatttattagtgatagaacgtttaacgaggacttattcagagttgttgttcaaatagatcccgaatatttcgataatgaacgaattatgtctttattctctacgagtgctgcggacattaaacgatttgatgagttagatattaataacagttatatatctaatataatttatgaggtgaacgatatcacattagatacaatggatgatatgaagaagtgtcaaatctttaacgaggatacgtcgtattatgttaaggaatacaatacatacctgtttttgcacgagtcggatcccatggtcatagagaacggaatactaaagaaactgtcatctataaaatccaagagtagacggctgaacttgtttagcaaaaacattttaaaatattatttagacggacaattggctcgtctaggtcttgtgttagatgattataaaggagacttgttagttaaaatgataaaccatcttaagtctgtggaggatgtatccgcattcgttcgattttctacagataaaaaccctagtattcttccatcgctaatcaaaactattttagctagttataatatttccatcatcgtcttatttcaaaggtttttgagagataatctatatcatgtagaagaattcttggataaaagcatccatctaaccaagacggataagaaatatatacttcaattgataagacacggtagatcatagaacagaccaaatatattattaataatttgtatatacatagatataattatcacacatttttgataaatgggaactgctgcaacaattcagactcccaccaaattaatgaataaagaaaatgcagaaatgattttggaaaaaattgttgatcatatagttatgtatattagtgacgaatcaagtgattcagaaaataatcctgaatatattgattttcgtaacagatacgaagactatagatctctcattataaaaagtgatcacgagtttgtaaagctatgtaaaaatcatgcggagaaaagttctccagaaacgcaacaaatgattatcaaacacatatacgaacaatatcttattccagtatctgaagtactattaaaacctataatgtccatgggtgacataattacatataacggatgtaaagacaatgaatggatgctagaacaactctctaccctaaactttaacaatctccgcacatggaactcatgtagcataggcaatgtaacgcgtctgttttatacattttttagttatctgatgaaagataaactaaatatataagtataatcccattctaatactttaacctgatgtattagcatcttattagaatattaacctaactaaaagacataacataaaaactcattacatagttgataaaaagcggtaggatataaatattatggctgccaccgttccgcgttttgacgacgtgtacaaaaatgcacaaagaagaattctagatcaagaaacattttttagtagaggtctaagtagaccgttaatgaaaaacacatatctatttgataattacgcgtatggatggataccagaaactgcaatttggagtagtagatacgcaaacctagatgctagtgactattatcccatttcgttgggattacttaaaaagttcgagtttctcatgtctctatataaaggtcctattcccgtatatgaagaaaaagtaaatactgaattcatagccaatggatcgttctctggtagatacgtatcatatcttcgaaagttttctgcccttccaacaaacgagtttattagttttttgttactgacttccattccaatctataatatcttgttctggtttaaaaacacacagtttgatattactaaacacacattattcagatacgtctatacagataatgccaaacacctggcgttggctaggtatatgcatcaaacaggagactataagcctttgtttagtcgtctcaaagagaattatatatttaccggtcccgttccaataagtatcaaagatatagatcaccctaatcttagtagagcaagaagtccatccgattatgagacattagctaatattagtactatattgtactttaccaagtatgatccggtattaatgtttttattgttttacgtacctgggtattcaattactacaaaaattactccagccgtagaatatctaatggataaactgaatctaacaaagagcgacgtacaactgttgtaaattattttatgcttcgtaaaatgtaggttttgaaccaaacattctttcaaagaatgagatgcataaaactttattatccaatagattgactatttcggacgtcaatcgtttaaagtaaacttcgtaaaatattctttgatcactgccgagtttaaaacttctatcgataattgtctcatatgttttaatatttacaagttttttggtccatggtacattagccggacaaatatatgcaaaataatatcgttctccaagttctatagtttctggattatttttattatattcagtaactaaatacatattagggttatctgcggatttataatttgagtgatgcattctactcaacataaataattctagaggagacgatctactatcaaattcggatcgtaaatctgtttctaaagaacggagaatatctatacatacctgattagaattcatccgtccttcagacaacatctcagacagtctggttttgtacatcttaatcatattcttatgaaacttggaaacatctcttctagtttcactagtacctttattaattctctcaggtacagattttgaattcgacgatgctgagtatttcatcgttgtatatttcttcttcgattgcataatcagattcttatataccgcctcaaactctattttaaaattattaaacaatactctattattaatcagtcgttctaactctttcgctatttctatagacttatctacatcttgactgtctatctctgtaaacacggagtcggtatctccatacacgctacgaaaacgaaatctgtaatctataggcaacgatgttttcacaatcggattaatatctctatcgtccatataaaatggattacttaatggattggcaaaccgtaacataccgttagataactctgctccatttagtaccgattctagatacaagatcattctacgtcctatggatgtgcaactcttagccgaagcgtatgagtatagagcactatttctaaatcccatcagaccatatactgagttggctactatcttgtacgtatattgcatggaatcatagatggccttttcagttgaactggtagcctgttttagcatctttttatatctggctctctctgccaaaaatgttcttaatagtctaggaatggttccttctatcgatctatcgaaaattgctatttcagagatgaggttcggtagtctaggttcacaatgaaccgtaatatatctaggaggtggatatttctgaagcaatagctgattatttatttcttcttccaatctattggtactaacaacgacaccgactaatgtttccggagatagatttccaaagatacacacattaggatacagactgttataatcaaagattaatacattattactaaacattttttgttttggagcaaataccttaccgccttcataaggaaacttttgttttgtttctgatctaactaagatagttttagtttccaacaatagctttaacagtggacccttgatgactgtactcgctctatattcgaataccatggattgaggaagcacatatgttgacgcacccgcgtctgtttttgtttctactccataatactcccacaaatactgacacaaacaagcatcatgaatacagtatctagccatatctaaagctatgtttagattataatccttatacatctgagctaaatcaacgtcatcctttccgaaagataatttatatgtatcattaggtaaagtaggacataatagtacgactttaaatccattttcccaaatatctttacgaattactttacatataatatcctcatcaacagtcacataattacctgtggttaaaacctttgcaaatgcagcggctttgcctttcgcgtctgtagtatcgtcaccgatgaacgtcatttctctaactcctctatttaatactttacccatgcaactgaacgcgttcttggatatagaatccaatttgtacgaatccaatttttcaaatttttgaatgaatgaatatagatcgaaaaatatagttccattattgttattaacgtgaaacgtagtattggccatgccgcctactcccttatgactagactgatttctctcataaatacagagatgtacagcttcctttttgtccggagatctaaagataattttctctcctgttaataactctagacgattagtaatatatctcagatcaaagttatgtccgttaaaggtaacgacgtagtcgaacgttagttccaacaattgtttagctattcgtaacaaaactatttcagaacatagaactagttctcgttcgtaatccatttccattagtgactgtatcctcaaacatcctctatcgacggcttcttgtatttcctgttccgttaacatctcttcattaatgagcgtaaacaataatcgtttaccacttaaatcgatataacagtaacttgtatgcgagattgggttaataaatacagaaggaaacttcttatcgaagtgacactctatatctagaaataagtacgatcttgggatatcgaatctaggtatttttttagcgaaacagttacgtggatcgtcacaatgataacatccattgttaatctttgtcaaatattgctcgtccaacgagtaacatccgtctggagatatcccgttagaaatataaaaccaactaatattgagaaattcatccatggtggcattttgtatgctgcgtttctttggctcttctatcaaccacatatctgcgacggagcattttctatctttaatatctagattataacttattgtctcgtcaatgtctatagttctcatctttcccaacggcctcgcattaaatggaggaggagacaatgactgatatatttcgtccgtcactacgtaataaaagtaatgaggaaatcgtataaatacggtctcgccatttcgacatctggatttcagatataaaaatctgttttcaccgtgactttcaaaccaattaatgcaccgaacatccatttatagaatttagaaatatattttcatttaaatgaatcccaaacattggggaagagccgtatggaccattatttttatagtactttcgcaagcgggtttagacggcaacatagaagcgtgtaaacgaaaactatatactatagttagcactcttccatgtcctgcatgtagacggcacgcgactatcgctatagaggacaataatgtcatgtctagcgatgatctgaattatatttattattttttcatcagattatttaacaatttggcatctgatcccaaatacgcgatcgatgtgacaaaggttaaccctttataaacttaacccattataaaacttatgattagtcacaactgaaataaccgcgtgattattttttggtataattctacacggcatggtttctgtgactatgaattcaacccccgttacattagtgaaatctttaacaaacagcaagggttcgtcaaagacataaaactcattgtttacaatcgaaatagaccccctatcacacttaaaataaaaaatatccttatcctttaccaccaaataaaattctgattggtcaatgtgaatgtattcacttaacagttccacaaatttatttattaactccgaggcacatacatcgtcggtattttttatggcaaactttactcttccagcatccgtttctaaaaaaatattaacgagttccatttatatcatccaatattattgaaatgacgttgatggacagatgatacaaataagaaggtacggtacctttgtccaccatctcctccaattcatgctctattttgtcattaactttaatgtatgaaaacagtacgccacatgcttccatgacagtgtgtaacactttggatacaaaatgtttgacattagtataattgtccaagactgtcaatctataatagatagtagctataatatattctatgatggtattgaagaagatgacaaccttggcatattgatcatttaacacagacatggtatcaacagatagcttgaatgaaagagaatcagtaattggaataagcgtcttctcgatagagtgtccgtataccaacatgtctgatattttgatgtattccattaaattatttagttttttctttttattctcgttaaacagcatttctgtcaacggaccccaacatcgttgaccgattaagttttgattgatttttccgtgtaaggcgtatctagtcagatcgtatagcctatccaataatccatcgtctgtgtgtagatcacatcgtacactttttaattctctatagaagagcgacagacatctggagcaattacagacagcaatttctttattctctacagatgtaagatacttgaagacattcctatgatgatgcagaattttggataacacggtattgatggtatctgttaccataattcctttgatggctgatagtgtcagagcacaagatttccaatctttgacaatttttagcaccattatctttgttttgatatctatatcagacagcatggtgcgtctgacaacacagggattaagacggaaagatgaaatgattctctcaacatcttcaatagataccttgctattttttctggcattatctatatgtgcgagaatatcctctagagaatcagtatcctttttgatgatagtggatctcaatgacatgggacgtttaaaccttcttattctatcaccagattgcatggtgatttgtcttctttcttttatcataatgtaatctctaaattcatcggcaaattgtctatatctaaaatcataatatgagatgtttacctctacaaatatctgttcgtccaatgttagagtatttacatcagttttgtattccaaattaaacatggcaacggatttaattttatattcctctattaagtcctcgtcgataataacagaatgtagataatcatttaatccgtcgtacatggttggaagatgcttgttgacaaaatctttaattgtcttgatgaaggtgggactatatctaacatcttgattaataaaatttataacattgtccataggatactttgtaactagttttatacacatctcttcatcggtaagtttagacagaatatcgtgaacaggtggtatattatattcatcagatatacgaagaacaatgtccaaatctatattgtttaatatattatatagatgtagcgtagctcctacaggaatatctttaactaagtcaatgatttcatcaaccgttagatctattttaaagttaatcatataggcattgatttttaaaaggtatgtagccttgactacattctcattaattaaccattccaagtcattgtgtgtaagaagattatattctatcataagcttgactacatttggtcccgataccattaaagaattcttatgatataaggaaacagattttaggtactcatctactctacaagaattttggagagccttaacgatatcagtgacgtttattatttcaggaggaaagaatctaacattgagaatatcggaattaatagcttccagatacagtgattttggcaatagtccgtgtaatccataatccagtaacacgagctggtgcttgctagacaccttttcaatgtttaatttttttgaaataagctttgataaagccttcctcgcaaattccggatacatgaacatgtcggcgacatgattaagtattgttttttcattatttttatattttctcaacaagttctcaataccccaatagatgatagaatatcacccaatgcgtccatgttgtctatttccaacaggtcgctatatccaccaatagaagtttttccaaaaaagattctaggaacagttctaccaccagtaatttgttcaaaataatcccgcaattcattttcgggtttaaattctttaatatcgacaatttcatacgctcctcttttgaaactaaacttatttagaatatccagtgcatttctacaaaaaggacatgtatacttgacaaaaattgtcactttgttattggccaacctttgttgtacaaattcctcggccattttaatatttaagtgatataaaactatctcgacttatttaactctttagtcgagatatatggacgcagatagctatatgatagccaactacagaaggcaaacgctataaaaaacataattacgacgagcatatttataaatatttttattcagcattacttgatatagtaatattaggcacagtcaaacattcaaccactctcgatacattaactctctcattttctttaacaaattctgcaatatcttcgtaaaaagattcttgaaactttttagaatatctatcgactctagatgaaatagcgttcgtcaacatactatgttttgtatacataaaggcgcccattttaacagtttctagtgacaaaatgctagcgatcctaggatcctttagaatcacatagattgacgattcgtctctcttagtaactctagtaaaataatcatacaatctagtacgcgaaataatattatccttgacttgaggagatctaaacaatctagttttgagaacatcgataagttcatcgggaatgacatacatactatctttaatagaactcttttcatccagttgaatggattcgtccttaaccaactgattaatgagatcttctattttatcattttccagatgatatgtatgtccattaaagttaaattgtgtagcgcttctttttagtctagcagccaatactttaacatcactaatatcgatatacaaaggagatgatttatctatggcattaagaattcgtttttcgacatccgtcaaaaccaattcctttttgcctgtatcatccagttttccatcctttgtaaagaaattattttctactagactattaataagactgataaggattcctccataattgcacaatccaaactttttaacaaaactagactttacgagatctacaggaatgcgtacttcaggttttttagcttgtgattttttcttttgcggacattttctagtaaccaactcatctaccatttcattgattttagcagtgaaataagctttcaatgcacgggcactgatactattgaaaacgagttgatcttcaaattccgccatttaagttcaccaaacaacttttaaatacaaatatatcaatagtagtagaataagaactataaaaaaaataataattaaccaaccccaacaaccggtattattagttgatgtggtagttttctcatcacttagaacagatttaacaatttctataaagtctgtcaaatcatcttccggagaccccataaatacaccaaatatagcggcgtacaacttatccatttatacattgaatattggcttttctttatcgctatcttcatcatattcatcatcaatatcaacaagtcccagattacgagccagatcttcttctacattttcagtcattgatacacgttcactatctccagagagtccgataacgttagccaccacttctctatcaatgattagtttcttgagcgcgaaagtaatttttgtttccgttccggatctatagaagacgataggtgtgataattgccttggccaattgtctttctcttttactgagtgattctagttcaccttctatagatctgagaatggatgattctccagtcgaaacatattctaccatggatccgtttaatttgttgatgaagatggattcatccttaaatgttttctctgtaatagtttccaccgaaagactatgcaaagaatttggaatgcgttccttgtgcttaatgtttccatagacggcttctagaagttgatacaacataggactagccgcggtaacttttatttttagaaagtatccatcgcttctatcttgtttagatttatttttataaagtttagtctctccttccaacataataaaagtggaagtcatttgactagataaactatcagtaagttttatagagatagacgaacaattagcgtattgagaagcatttagtgtaacgtattcgatacattttgcattagatttactaatcgattttgcatactctataacacccgcacaagtctgtagagaatcgctagatgcagtaggtcttggtgaagtttcaactctcttcttgattaccttactcatgattaaacctaaataattgtactttgtaatataatgatatatattttcactttatctcatttgagaataaaaatgtttttgtttaaccactgcatgatgtacagatttcggaatcgcaaaccaccagtggttttattttatccttgtccaatgtgaattgaatgggagcggatgcgggtttcgtacgtagatagtacattcccgtttttagaccgagactccatccgtaaaaatgcatactcgttagtttggaataactcggatctgctatatggatattcatagattgactttgatcgatgaaggctcccctgtctgcagccatttttatgatcgtcttttgtggaatttcccaaatagttttataaactcgcttaatatcttctggaaggtttgtattctgaatggatccaccatctgccataatcctattcttgatctcatcattccataattttctctcggttaaaactctaaggagatgcggattaactacttgaaattctccagacaatactctccgagtgtaaatattactggtatacggttccaccgactcattatttcccaaaatttgagcagttgatgcagtcggcataggtgccaccaataaactatttctaagaccgtatgttctgattttatcttttagaggttcccaattccaaagatccgacggtacaacattccaaagatcatattgtagaataccgttactggcgtacgatcctacatatgtatcgtatggtccttccttctcagctagttcacaactcgcctctaatgcaccgtaataaatggtttcgaagatcttcttatttagatcttgtgcttccaggctatcaaatggataatttaagagaataaacgcgtccgctaatccttgaacaccaataccgataggtctatgtctcttattagagatttcagcttctggaataggataataattaatatctataattttattgagatttctgacaattactttgaccacatccttcagtttgagaaaatcaaatcgcccatctattacaaacatgttcaaggcaacagatgccagattacaaacggctacctcattagcatccgcatattgtattatctcagtgcaaagattactacacttgatagttcctaaattttgttgattactctttttgttacacgcatccttataaagaatgaatggagtaccagtttcaatctgagattctataatcgctttccagacgactcgagcctttattatagatttgtatctcctttctctttcgtatagtgtatacaatcgttcgaactcgtctccccaaacattgtccaatccaggacattcatccggacacatcaacgaccactctccgtcatccttcactcgtttcataaagagatcaggaatccaaagagctataaatagatctctggttctatgttcctcgtttcctgtattctttttaagatcgaggaacgccataatatcagaatgccacggttccaagtatatggccataactccaggccgtttgtttcctccctgatctatgtatctagcggtgttattataaactctcaacattggaataataccgtttgatataccattggtaccggagatatagcttccactggcacgaatattactaattgatagacctattccccctgccattttagagattaatgcgcatcgttttaacgtgtcatagataccctctatgctatcatcgatcatgttaagtagaaaacagctagacatttggtgacgactagttcccgcattaaataaggtaggagaagcgtgcgtaaaccatttttcagaaagtagattgtacgtctcaatagctgagtctatatcccattgatgaattcctactgcgacacgcattaacatgtgctgaggtctttcaacgatcttgttgtttattttcaacaagtaggatttttccaaagttttaaaaccaaaatagttgtatgaaaagtctcgttcgtaaataataaccgagttgagtttatccttatatttgttaactatatccatggtgatacttgaaataatcggagaatgtttcccatttttaggattaacatagttgaataaatcctccatcacttcactaaatagtttttttgtttccttgtgtagatttgatacggctattctggcggctagaatggcataatccggatgttgtgtagtacaagtggctgctatttcggctgccagagtgtccaattctaccgttgttactccattatatattccttgaataaccttcatagctattttaataggatctatatgatccgtgtttaagccataacataattttctaatacgagacgtgattttatcaaacatgacattttccttgtatccatttcgtttaatgacaaacatttttgttggtgtaataaaaaaattatttaacttttcattaatagggatttgacgtatgtagcgtacaaaatgattgttcctggtatatagataaagagtcctatatatttgaaaatcgttacggctcgattaaactttaatgattgcatagtgaatatatcattaggatttaactccttgactatcatggcggcgccagaaattaccatcaaaagcattaatacagttataccgatcgcagttagaacggttatagcatccaccatttatatctaaaaattagatcaaagaatatgtgacaaagtcctagttgtatactgagaattgacgaaacaatgtttcttacatatttttttcttattagtaaccgacttaatagtaggaactggaaaactagacttgattattctataagtatagatacccttccaaataatattctctttgataaaagttccagaaaatgtagaattttttaaaaagttatcttttgctattaccaagattgtgtttagacgcttattattaatatgagtgatgaaatccacaccgcctctagatatcgcctttatttccacattagatggtaaatccaatagtgaaactatctttttaggaatgtatggactcgcgtttagaggagtaaacgtcttaggcgtcggaaaggatgattcatcaaacgaataaacaatttcacaaatggatgttaatgtattagtaggaaattttttgacgctattggaattgaagattctaatggatgatgttctacctatttcatccgataacatgttaatttccgacaccaacggttttaatatttcgatgatatacggtagtctctctttcggacttatatagcttattccacaatacgagtcattatatactccaaaaaacaaaataactagtataaaatctgtatcgaatgggaaaaacgaaattatcgacataggtatagaatccggaacattgaacgtattaatacttaattctttttctgtggtaagtaccgataggttattgacattgtatggttttaaatattctataacttgagacttgatagatattagtgatgaattgaaaattatttttatcaccacgtgtgtttcaggatcatcgtcgacgcccgtcaaccaaccgaacggagtaaaataaatatcattaatatatgctctagatattagtatttttatcaatcctttgattatcatcttctcgtaggcgaatgattccatgatcaagagtgatttaagaacatcctccggagtattaatgggcttagtaaacagtccatcgttgcaataataaaagttatccaagttaaaggatattatgcattcgtttaaagatatcacctcatctgacggagacaattttttggtaggttttagagactttgaagctacttgtttaacaaagttattcatcgtcgtctactattctatttaattttgtagttaatttatcacatatcacattaattgactttttggtccacttttccatacgtttatattcttttaatcctgcgttatccgtttccgttatatccagggatagatcttgcaagttaaatagaatgctcttaaataatgtcattttcttatccgctaaaaatttaaagaatgtataaacctttttcagagatttgaaactcttaggtggtgtcctagtacacaatatcataaacaaactaataaacattccacattcagattccaacagctgattaacttccacattaatacagcctattttcgctccaaatgtacattcgaaaaatctgaataaaacatcgatgtcacaatttgtattatccaatacagaatgtttgtgattcgtgttaaaaccatcggagaaggaatagaaataaaaattattatagtggtggaattcagttggaatattgcctccggagtcataaaaggatactaaacattgttttttatcataaattacacatttccaatgagacaaataacaaaatccaaacattacaaatctagaggtagaacttttaattttgtctttaagtatatacgataagatatgtttattcataaacgcgtcaaatttttcatgaatcgctaaggagtttaagaatctcatgtcaaattgtcctatataatccacttcggatccataagcaaactgagagactaagttcttaatacttcgattgctcatccaggctcctctctcaggctctattttcatcttgacgacctttggattttcaccagtatgtattcctttacgtgataaatcatcgattttcaaatccatttgtgagaagtctatcgccttagatactttttcccgtagtcgaggtttaaaaaaatacgctaacggtatactagtaggtaactcaaagacatcatatatagaatggtaacgcgtctttaactcgtcggttaactctttcttttgatcgagttcgtcgctactattgggtctgctcaggtgccccgactctactagttccaacatcataccgataggaatacaagacactttgccggcggttgtagatttatcatatttttccactacatatccgttacaatttgttaaaaatttagatacatctatattgctacataatccagctagtgaatatatatgacataataaattggtaaatcctagttctggtattttactaattactaaatctgtatatctttccatttatcatggaaaagaatttaccagatatcttcttttttccaaactgcgttaatgtattctcttacaaatattcacaagatgaattcagtaatatgagtaaaacggaacgtgatagtttctcattggccgtgtttccagttataaaacatagatggcataacgcacacgttgtaaaacataaaggaatatacaaagttagtacagaagcacgtggaaaaaaagtatctcctccatcactaggaaaacccgcacacataaacctaaccgcgaagcaatatatatacagtgaacacacaataagctttgaatgttatagttttctaaaatgtataacaaatacagaaatcaattcgttcgatgagtatatattaagaggactattagaagctggtaatagtttacagatattttccaattccgtaggtaaacgaacagatactataggtgtactagggaataagtatccatttagcaaaattccattggcctcattaactcctaaagcacaacgagagatattttcagcgtggatttctcatagacctgtagttttaactggaggaactggagtgggtaagacgtcacaggtacccaagttattgctttggtttaattatttatttggtggattctctactctagataaaatcactgactttcacgaaagaccagtcattctatctcttcctaggatagctttagttagattgcatagcaataccattttaaaatcattgggatttaaggtactagatggatctcctatttctttacggtacggatctataccggaagaattaataaacaaacaaccaaaaaaatatggaattgtattttctacccataagttatctctaacaaaactatttagttatggcactcttattatagacgaagttcatgagcatgatcaaataggagatattattatagcagtagcgagaaagcatcatacgaaaatagattctatgtttttaatgactgccacgttagaggatgacagggaacggctaaaagtatttttacctaatcccgcatttatacatattcctggagatacactgtttaaaattagcgaggtatttattcataataagataaatccatcttccagaatggcatacatagaagaagaaaagagaaatttagttactgctatacagatgtatactcctcctgatggatcatccggtatagtctttgtggcatccgttgcacagtgtcacgaatataaatcatatttagaaaaaagattaccgtatgatatgtatattattcatggtaaggtcttagatatagacgaaatattagaaaaagtgtattcatcacctaatgtatcgataattatttctactccttatttggaatccagcgttactatacgcaatgttacacacatttatgatatgggtagagtttttgtccccgctccttttggaggatcgcaacaatttatttctaaatctatgagagatcaacgaaaaggaagagtaggaagagttaatcctggtacatacgtctatttctatgatctgtcttatatgaagtctatacagcgaatagattcagaatttctacataattatatattgtacgctaataagtttaatctaacactccccgaagatttgtttataatccctacaaatttggatattctatggcgtacaaaggaatatatagactcgttcgatattagtacagaaacatggaataaattattatccaattattatatgaagatgatagagtatgctaaactttatgtactaagtcctattctcgctgaggagttggataactttgagaggacgggagaattaactagtattgtacgagaagccattttatctctaaatttacaaattaagattttaaattttaaacataaagatgatgatacgtatatacacttttgtaaaatattattcggtgtctataacggaacaaacgctactatatattatcatagacctctaacgggatatatgaatatgatttcagatactatatttgttcctgtagataataactaaaaatcaaactctaatgaccacatctttttttagagatgaaaaattttccacatctccttttgtagacacgactaaacattttgcagaaaaaagtttattagtgtttagataatcgtatacttcatcagtgtagatagtaaatgtgaacagataaaaggtattcttgctcaatagattggtaaattccatagaatatattaatcctttcttcttgagatcccacatcatttcaaccagagacgttttatccaatgatttacctcgtactataccacatacaaaactagattttgcagtgacgtcgtacctggtattcctaccaaacaaaattttacttttagttcttttagaaaattctaaggtagaatctctatttgccaatatgtcatctatggaattaccactagcaaaaaatgatagaaatatatattgatacatcgcagctggttttgatctactatactttaaaaacgaatcagattccataattgcctgtatatcatcagctgaaaaactatgttttacacgtattccttcggcatttctttttaatgatatatcttgtttagacaatgataaagttatcatgtccatgagagacgcgtctccgtatcgtataaatatttcattagatgttagacgcttcattaggggtatacttctataaggtttcttaatcagtccatcattggttgcgtcaagaactactatcggatgttgttgggtatctctagtgttacacatggccttactaaagtttgggtaaataactatgatatctctattaattatagatgcatatatttcattcgtcaaggatattagtatcgacttgctatcgtcattaatacgtgtaatgtaatcatataaatcatgcgatagccaaggaaaatttaaatagatgttcatcatataatcgtcgctataattcatattaatacgttgacattgactaatttgtaatatagcctcgccacgaagaaagctctcgtattcagtttcatcgataaaggataccgttaaatataactggttgccgatagtctcatagtctattaagtggtaagtttcgtacaaatacagaatccctaaaatattatctaatgttggattaatctttaccataactgtataaaatggagacggagtcataactattttaccgtttgtacttactggaatagatgaaggaataatctccggacatgctggtaaagacccaaatgtctgtttgaagaaatccaatgttccaggtcctaatctcttaacaaaaattacgatattcgatcccgatatcctttgcattctatttaccagcatatcacgaactatattaagattatctatcatgtctattctcccaccgttatataaatcgcctccgctaagaaacgttagtatatccatacaatggaatacttcatttctaaaatagtattcgttttctaattctttaatgtgaaatcgtatactagaaagggaaaaattatctttgagttttccgttagaaaagaaccacgaaactaatgttctgattgcgtccgattccgttgctgaattaatggatttacaccaaaaactcatataacttctagatgtagaagcattcgctaaaaaattagtagaatcaaaggatataagtagatgttccaacaagtgagcaattcccaagatttcatctatatcattctcgaatccgaaattagaaattcccaagtagatatcctttttcatccgatcgttgatgaaaatacgaactttattcggtaagacaatcatttactaaggagtaaaataggaagtaatgttcgtatgtcgttatcatcgtataaattaaaggtgtgttttttaccattaagtgacattataattttaccaatattggaattataatataggtgtatttgcgcactcgcgacggttgatgcatcggtaaatatagctgtatctaatgttctagtcggtatttcatcatttcgctgtctaataatagcgttttctctatctgtttccattacagctgcctgaagtttattggtcggataatatgtaaaataataagaaatacatacgaataacaaaaataaaataagatataataaagatgccatttagagatctaattttgtttaacttgtccaaattcctacttacagaagatgaggaatcgttggagatagtgtcttccttatgtagaggatttgaaatatcttataatgacttgataacttactttccagataggaaataccataaatatatttataaagtatttgaacatgtagatttatcggaggaattaagtatggaattccatgatacaactctgagagatttagtctatcttagattgtacaagtattccaagtgtatacggccgtgttataaattaggagataatctaaaaggcatagttgttataaaggacaggaatatttatattagggaagcaaatgatgacttgatagaatatctcctcaaggaatacactcctcagatttatacatattctaatgagcgcgtccccataactggttcaaaattaattctttgtggattttctcaagttacatttatggcgtatacaacgtcgcatataacaacaaataaaaaggtagatgttctcgtttccaaaaaatgtatagatgaactagtcgatccaataaattatcaaatacttcaaaatttatttgataaaggaagcggaacaataaacaaaatactcaggaagatattttattcggtaacaggtggccaaactccataggtagctttttctatttcggattttagaatttccaaattcaccagcgatttatcggttttggtgaaatccaaggatttattaatgtccacaaatgccatttgttttgtctgtggattgtatttgaaaatggaaacgatgtagttagatagatgcgctgcgaagtttcctattagggttccgcgcttcacgtcacccagcatacttgaatcaccatcctttaaaaaaaatgataagatatcaacatggagtatatcatactcgaattttaattcttctactgactcactgacattttcacaaatactacaatacggtttaccgaaaataatcagtacgttcttcatttatgggtatcaaaaacttaaaatcgttactgctggaaaataaatcactgacgatattagatgataatttatacaaagtatacaatggaatatttgtggatacaatgagtatttatatagccgtcgccaattgtgtcagaaacttagaagagttaactacggtattcataaaatacgtaaacggatgggtaaaaaagggagggcatgtaaccctttttatcgatagaggaagtataaaaattaaacaagacgttagagacaagagacgtaaatattctaaattaaccaaggacagaaaaatgttagaattagaaaagtgtacatccgaaatacaaaatgttaccggatttatggaagaagaaataaaggcagaaatgcaattaaaaatcgataaactcacatttcaaatatatttatctgattctgataacataaaaatatcattgaatgagatactaacacatttcaacaataatgagaatgttacattattttattgtgatgaacgagacgcagaattcgttatgtgtctcgaggctaaaacacatttctctaccacaggagaatggccgttgataataagtaccgatcaggatactatgctatttgcatctgctgataatcatcctaagatgataaaaaacttaactcaactgtttaaatttgttccctcggcagaggataactatttagcaaaattaacggcgttagtgaatggatgtgatttctttcctggactctatggggcatctataacacccaccaacttaaacaaaatacaattgtttagtgattttacaatcgataatatagtcactagtttggcaattaaaaattattatagaaagactaactctaccgtagacgtgcgtaatattgttacgtttataaacgattacgctaatttagacgatgtctactcgtatattcctccttgtcaatgcactgttcaagaatttatattttccgcattagatgaaaaatggaatgaatttaaatcatcttatttagaaagcgtgccgttaccctgccaattaatgtacgcgttagaaccacgcaaggagattgatgtttcagaagttaaaactttatcatcttatatagatttcgaaaatactaaatcagatatcgatgttataaaatctatatcctcgatcttcggatattctaacgaaaactgtaacacgatagtattcggcatctataaggataatttactactgagtataaataattcattttactttaacgatagtctgttaataaccaatactaaaagtgataatataataaatataggttactagattaaaaatggtgttccaactcgtgtgctctacatgcggtaaagatatttctcacgaacgatataaattgattatacgaaaaaaatcattaaaggatgtactcgtcagtgtaaagaacgaatgttgtaggttaaaattatctacacaaatagaacctcaacgtaacttaacagtgcaacctctattggatataaactaatatggatccggttaattttatcaagacatatgcgcctagaggttctattatttttattaattataccatgtcattaacaagtcatttgaatccatcgatagaaaaacatgtgggtatttattatggtacgttattatcggaacacttggtagttgaatctacctatagaaaaggagttcgaatagtcccattggatagtttttttgaaggatatcttagtgcaaaagtatacatgttagagaatattcaagttatgaaaatagcagctgatacgtcattaactttattgggtattccgtatggatttggtcatgatagaatgtattgttttaaattggtagctgactgttataaaaatgccggtattgatacatcgtctaaacgaatattgggcaaagatatttttctgagccaaaacttcacagacgataatagatggataaagatatatgattctaataatttaacattttggcaaattgattaccttaaagggtgagttaatatgcataactactcctccgttgttttttccctcgttctttttcttaacgttgtttgccatcactctcataatgtaaagatattctaaaatggtaaacttttgcatatcggacgcagaaattggtataaatgttgtaattgtattatttcccgtcaatggactagtcacagctccatcagttttatatcctttagagtatttctcactcgtgtctaacattctagagcattccatgatctgtttatcgttgatattggccggaaagatagattttttattttttattatattactattggcaattgtagatataacttctggtaaatatttttctaccttttcaatctcttctattttcaagccggctatatattctgctatattgttgctagtatcaataccttttctggctaagaagtcatatgtggtattcactatatcagttttaactggtagttccattagcctttccacttctgcagaataatcagaaattggttctttaccagaaaatccagctactataataggctcaccgatgatcattggcaaaatcctatattgtaccagattaatgagagcatatttcatttccaataattctgctagttcttgagacattgatttatttgatgaatctagttggttctctagatactctaccatttctgccgcatacaataacttgttagataaaatcagggttatcaaagtgtttagcgtggctagaatagtgggcttgcatgtattaaagaatgcggtagtatgagtaaaccgttttaacgaattatatagtctccagaaatctgtggcgttacatacatgagccgaatgacatcgaagattgtccaatatttttaatagctgctctttgtccattatttctatatttgactcgcaacaattgtagataccattaatcaccgattcctttttcgatgccggacaatagcacaattgtttagctttggactctatgtattcagaattaatagatatatctctcaatacagattgcactatacattttgaaactatgtcaaaaattgtagaacgacgctgttctgcagccatttaactttaaataatttacaaaaatttaaaatgagcatccgtataaaaatcgataaactgcgccaaattgtggcatatttttcagagttcagtgaagaagtgtctataaatgtagactcgacggatgagttaatgtatatttttgccgccttgggcggatctgtaaacatttgggcaattatacctctaagtgcatcagtgttttaccgaggagccgaaaatattgtgtttaatcttcctgtgtccaaggtaaaatcgtgtttgtgtagttttcacaatgatgccatcatagatatagaacctgatctggaaaataatctagtaaaactttctagttatcatgtagtaagtgtcgattgtaacaaggaactgatgcctattaggacagatactactatttgtctaagtatagatcaaaagaaatcttacgtgtttaattttcacaagtatgaagaaaaatgttgtggtagaaccgtcattcatctagaatggttgttgggctttatcaagtgtattagtcagcatcagcatctggctattatgtttaaagatgacaatattattatgaagactcctggtaatactgatgcgttttccagggaatattctatgactgaatgttctcaagaactacaaaagttttctttcaaaatagctatctcgtctctcaacaaactacgaggattcaaaaagagagtcaatgtttttgaaactagaatcgtaatggataatgacgataacattttaggaatgttgttttcggatagagttcaatcctttaagatcaacatctttatggcgtttttagattaatactttcaatgagataaatatgggtggcggagtaagtgttgagctccctaaacgggatccgcctccgggagtacccactgatgagatgttattaaacgtggataaaatgcatgacgtgatagctcccgctaagcttttagaatatgtgcatataggaccactagcaaaagataaagaggataaagtaaagaaaagatatccagagtttagattagtcaacacaggacccggtggtctttcggcattgttaagacaatcgtataatggaaccgcacccaattgctgtcgcacttttaatcgtactcattattggaagaaggatggaaagatatcagataagtatgaagagggtgcagtattagaatcgtgttggccagacgttcacgacactggaaaatgcgatgttgatttattcgactggtgtcagggggatacgttcgatagaaacatatgccatcagtggatcggttcagcctttaataggagtaatagaactgtagagggtcaacaatcgttaataaatctgtataataagatgcaaacattatgtagtaaagatgctagtgtaccaatatgcgaatcatttttgcattatttacgcgcacacaatacagaagatagcaaagagatgatcgattatattctaagacaacagtctgcggactttaaacagaaatatatgagatgtagttatcccactagagataagttagaagagtcattaaaatatgcggaacctcgagaatgttgggatccagagtgttcgaatgccaatgttaatttcttactaacacgtaattataataatttaggactttgcaatattgtacgatgtaataccagcgtgaacaacttacagatggataaaacttcctcattaagattgtcatgtggattaagcaatagtgatagattttctactgttcccgtcaatagagcaaaagtagttcaacataatattaaacactcgttcgacctaaaattgcatttgatcagtttattatctctcttggtaatatggatactaattgtagctatttaaatgggtgccgcggcaagcatacagacgacggtgaatacactcagcgaacgtatctcgtctaaattagaacaagaagcgaacgctagtgctcaaacaaaatgtgatatagaaatcggaaatttttatatccgacaaaaccatggatgtaacctcactgttaaaaatatgtgctctgcggacgcggatgctcagttggatgctgtgttatcagccgctacagaaacatatagtggattaacaccggaacaaaaagcatacgtgccagctatgtttactgctgcgttaaacattcagacgagtgtaaacactgttgttagagattttgaaaattatgtgaaacagacttgtaattctagcgcggtcgtcgataacaaattaaagatacaaaacgtaatcatagatgaatgttacggagccccaggatctccaacaaatttggaatttattaatacaggatctagcaaaggaaattgtgccattaaagcgttgatgcaattgacgactaaggccactactcaaatagcacctagacaagttgctggtacaggagttcagttttatatgattgttatcggtgttataatattggcagcgttgtttatgtactatgccaagcgtatgttgttcacatccaccaatgataaaatcaaacttattttagccaataaggaaaacgtccattggactacttacatggacacattctttagaacttctccgatggttattgctaccacggatatgcaaaactgaaaatatattgataatattttaatagattaacatggaagttatcgctgatcgtctagacgatatagtgaaacaaaatatagcggatgaaaaatttgtagattttgttatacacggtctagagcatcaatgtcctgctatacttcgaccattaattaggttgtttattgatatactattatttgttatagtaatttatatttttacggtacgtctagtaagtagaaattatcaaatgttgttggtggtgctagtcatcacattaactattttttattactttatactataatagtactagactgacttctaacaaacatctcacctgccataaataaatgcttgatattaaagtcttctatttctaacactattccatctgtggaaaataatactctgacattatcgctaattgacacatcggtgagtgatatgcctataaagtaataatcttctttgggcacatataccagtgtaccaggttctaacaacctatttactggtgctcctgtagcatactttttctttaccttgagaatatccatcgtttgcttggtcaatagcgatatgtgattttttatcaaccactcaaaaaagtaattggagtgttcatatcctctacgggctattgtctcatggccgtgtatgaaatttaagtaacacgactgtggtagatttgttctatagagccgattgccgcaaatagatagaactaccaatatgtctgtacaaatgttaaacattaattgattaacagaaaaaacaatgttcgttctgggaatagaaaccagatcaaaacaaaattcgttagaatatatgccacgtttatacatggaatataaaataactacagtttgaaaaataacagtatcatttaaacatttaacttgcggggttaatctcacaactttactgtttttgaactgttcaaaatatagcatcgatccgtgagaaatacgtttagccgcctttaatagaggaaatcccaccgcctttctggatctcaccaacgacgatagttctgaccagcaactcatttcttcatcatccacctgttttaacatataataggcaggagatagatatccgtcattgcaatattccttctcgtaggcacacaatctaatattgataaaatctccattctcttctctgcatttattatcttgtctcggtggctgattaggctgtggtcttggtttaggccttggtctatcgttgttgaatctattttggtcattaaatctttcatttcttcctggtatatttctatcacctcgtttggttggatttttgtctatattatcgtttgtaacatcggtacgggtattcatttatcacaaaaaaaacttctctaaatgagtctactgctagaaaacctcatcgaagaagataccatattttttgcaggaagtatatctgagtatgatgatttacaaatggttattgccggcgcaaaatccaaatttccaagatctatgctttctatttttaatatagtacctagaacgatgtcaaaatatgagttggagttgattcataacgaaaatatcacaggagcaatgtttaccacaatgtataatataagaaacaatttgggtctaggagatgataaactaactattgaagccattgaaaactatttcttggatcctaacaatgaagttatgcctcttattattaataatacggatatgactgccgtcattcctaaaaaaagtggtaggagaaagaataagaacatggttatcttccgtcaaggatcatcacctatcttgtgcattttcgaaactcgtaaaaagattaatatttataaagaaaatatggaatccgcgtcgactgagtatacacctatcggagacaacaaggctttgatatctaaatatgcgggaattaatgtcctgaatgtgtattctccttccacatccataagattgaatgccatttacggattcaccaataaaaataaactagagaaacttagtactaataaggaactagaatcgtatagttctagccctcttcaagaacccattaggttaaatgattttctgggactattggaatgtgttaaaaagaatattcctctaacagatattccgacaaaggattgattactataaatggagaatgttcctaatgtatactttaatcctgtgtttatagagcccacgtttaaacattctttattaagtgtttataaacacagattaatagttttatttgaagtattcgttgtattcattctaatatatgtattttttagatctgaattaaatatgttcttcatgcctaaacgaaaaatacccgatcctattgatagattacgacgtgctaatctagcgtgtgaagacgataaattaatgatctatggattaccatggatgacaactcaaacatctgcgttatcaataaatagtaaaccgatagtgtataaagattgtgcaaagcttttgcgatcaataaatggatcacaaccagtatctcttaacgatgttcttcgcagatgatgattcattttttaagtatttggctagtcaagatgatgaatcttcattatctgatatattgcaaatcactcaatatctagactttctgttattattattgatccaatcaaaaaataaattagaagctgtgggtcattgttatgaatctctttcagaggaatacagacaattgacaaaattcacagactttcaagattttaaaaaactgtttaacaaggtccctattgttacagatggaagggtcaaacttaataaaggatatttgttcgactttgtgattagtttgatgcgattcaaaaaagaatcctctctagctaccaccgcaatagatcctgttagatacatagatcctcgtcgcaatatcgcattttctaacgtgatggatatattaaagtcgaataaagtgaacaataattaattctttattgtcatcatgaacggcggacatattcagttgataatcggccccatgttttcaggtaaaagtacagaattaattagacgagttagacgttatcaaatagctcaatataaatgcgtgactataaaatattctaacgataatagatacggaacgggactatggacgcatgataagaataattttgaagcattggaagcaactaaactatgtgatgtcttggaatcaattacagatttctccgtgataggtatcgatgaaggacagttctttccagacattgttgaattagatcgataaaaattaattaattacccgggtaccaggcctagatctgtcgagatccggtggtggtgcaaatcaaagaactgctcctcagtggatgttgcctttacttctaggcctgtacggaagtgttacttctgctctaaaagctgctgcagggggggggggggggtgggggggccggttagggccgccatcccctcagagcgtcgggatatcgggtggcggctcgggacggaggacgcgctagtgttcttctgtgtggcagttcagaatgatggatcaagctagatcagcattctctaacttgtttggtggagaaccattgtcatatacccggttcagcctggctcggcaagtagatggcgataacagtcatgtggagatgaaacttgctgtagatgaagaagaaaatgctgacaataacacaaaggccaatgtcacaaaaccaaaaaggtgtagtggaagtatctgctatgggactattgctgtgatcgtctttttcttgattggatttatgattggctacttgggctattgtaaaggggtagaaccaaaaactgagtgtgagagactggcaggaaccgagtctccagtgagggaggagccaggagaggacttccctgcagcacgtcgcttatattgggatgacctgaagagaaagttgtcggagaaactggacagcacagacttcaccagcaccatcaagctgctgaatgaaaattcatatgtccctcgtgaggctggatctcaaaaagatgaaaatcttgcgttgtatgttgaaaatcaatttcgtgaatttaaactcagcaaagtctggcgtgatcaacattttgttaagattcaggtcaaagacagcgctcaaaactcggtgatcatagttgataagaacggtagacttgtttacctggtggagaatcctgggggttatgtggcgtatagtaaggctgcaacagttactggtaaactggtccatgctaattttggtactaaaaaagattttgaggatttatacactcctgtgaatggatctatagtgattgtcagagcagggaaaatcacctttgcagaaaaggttgcaaatgctgaaagcttaaatgcaattggtgtgttgatatacatggaccagactaaatttcccattgttaacgcagaactttcattctttggacatgctcatctggggacaggtgacccttacacacctggattcccttccttcaatcacactcagtttccaccatctcggtcatcaggattgcctaatatacctgtccagacaatctccagagctgctgcagaaaagctgtttgggaatatggaaggagactgtccctctgactggaaaacagactctacatgtaggatggtaacctcagaaagcaagaatgtgaagctcactgtgagcaatgtgctgaaagagataaaaattcttaacatctttggagttattaaaggctttgtagaaccagatcactatgttgtagttggggcccagagagatgcatggggccctggagctgcaaaatccggtgtaggcacagctctcctattgaaacttgcccagatgttctcagatatggtcttaaaagatgggtttcagcccagcagaagcattatctttgccagttggagtgctggagactttggatcggttggtgccactgaatggctagagggatacctttcgtccctgcatttaaaggctttcacttatattaatctggataaagcggttcttggtaccagcaacttcaaggtttctgccagcccactgttgtatacgcttattgagaaaacaatgcaaaatgtgaagcatccggttactgggcaatttctatatcaggacagcaactgggccagcaaagttgagaaactcactttagacaatgctgctttccctttccttgcatattctggaatcccagcagtttctttctgtttttgcgaggacacagattatccttatttgggtaccaccatggacacctataaggaactgattgagaggattcctgagttgaacaaagtggcacgagcagctgcagaggtcgctggtcagttcgtgattaaactaacccatgatgttgaattgaacctggactatgagaggtacaacagccaactgctttcatttgtgagggatctgaaccaatacagagcagacataaaggaaatgggcctgagtttacagtggctgtattctgctcgtggagacttcttccgtgctacttccagactaacaacagatttcgggaatgctgagaaaacagacagatttgtcatgaagaaactcaatgatcgtgtcatgagagtggagtatcacttcctctctccctacgtatctccaaaagagtctcctttccgacatgtcttctggggctccggctctcacacgctgccagctttactggagaacttgaaactgcgtaaacaaaataacggtgcttttaatgaaacgctgttcagaaaccagttggctctagctacttggactattcagggagctgcaaatgccctctctggtgacgtttgggacattgacaatgagttttaaatgtgatacccatagcttccatgagaacagcagggtagtctggtttctagacttgtgctgatcgtgctaaattttcagtagggctacaaaacctgatgttaaaattccatcccatcatcttggtactactagatgtctttaggcagcagcttttaatacagggtagataacctgtacttcaagttaaagtgaataaccacttaaaaaatgtccatgatggaatattcccctatctctagaattttaagtgctttgtaatgggaactgcctctttcctgttgttgttaatgaaaatgtcagaaaccagttatgtgaatgatctctctgaatcctaagggctggtctctgctgaaggttgtaagtggtcgcttactttgagtgatcctccaacttcatttgatgctaaataggagataccaggttgaaagaccttctccaaatgagatctaagcctttccataaggaatgtagctggtttcctcattcctgaaagaaacagttaactttcagaagagatgggcttgttttcttgccaatgaggtctgaaatggaggtccttctgctggataaaatgaggttcaactgttgattgcaggaataaggccttaatatgttaacctcagtgtcatttatgaaaagaggggaccagaagccaaagacttagtatattttcttttcctctgtcccttcccccataagcctccatttagttctttgttatttttgtttcttccaaagcacattgaaagagaaccagtttcaggtgtttagttgcagactcagtttgtcagactttaaagaataatatgctgccaaattttggccaaagtgttaatcttaggggagagctttctgtccttttggcactgagatatttattgtttatttatcagtgacagagttcactataaatggtgtttttttaatagaatataattatcggaagcagtgccttccataattatgacagttatactgtcggttttttttaaataaaagcagcatctgctaataaaacccaacagatactggaagttttgcatttatggtcaacacttaagggttttagaaaacagccgtcagccaaatgtaattgaataaagttgaagctaagatttagagatgaattaaatttaattaggggttgctaagaagcgagcactgaccagataagaatgctggttttcctaaatgcagtgaattgtgaccaagttataaatcaatgtcacttaaaggctgtggtagtactcctgcaaaattttatagctcagtttatccaaggtgtaactctaattcccattttgcaaaatttccagtacctttgtcacaatcctaacacattatcgggagcagtatcttccataatgtataaagaacaaggtagtttttacctaccacagtgtctgtatcggagacagtgatctccatatgttacactaagggtgtaagtaattatcgggaacagtgtttcccataattttcttcatgcaatgacatcttcaaagcttgaagatcgttagtatctaacatgtatcccaactcctataattccctatcttttagttttagttgcagaaacattttgtggtcattaagcattgggtgggtaaattcaaccactgtaaaatgaaattactacaaaatttgaaatttagcttgggtttttgttacctttatggtttctccaggtcctctacttaatgagatagtagcatacatttataatgtttgctattgacaagtcattttaactttatcacattatttgcatgttacctcctataaacttagtgcggacaagttttaatccagaattgaccttttgacttaaagcagagggactttgtatagaaggtttgggggctgtggggaaggagagtcccctgaaggtctgacacgtctgcctacccattcgtggtgatcaattaaatgtaggtatgaataagttcgaagctccgtgagtgaaccatcattataaacgtgatgatcagctgtttgtcatagggcagttggaaacggcctcctagggaaaagttcatagggtctcttcaggttcttagtgtcacttacctagatttacagcctcacttgaatgtgtcactactcacagtctctttaatcttcagttttatctttaatctcctcttttatcttggactgacatttagcgtagctaagtgaaaaggtcatagctgagattcctggttcgggtgttacgcacacgtacttaaatgaaagcatgtggcatgttcatcgtataacacaatatgaatacagggcatgcattttgcagcagtgagtctcttcagaaaacccttttctacagttagggttgagttacttcctatcaagccagtacgtgctaacaggctcaatattcctgaatgaaatatcagactagtgacaagctcctggtcttgagatgtcttctcgttaaggagatgggccttttggaggtaaaggataaaatgaatgagttctgtcatgattcactattctagaacttgcatgacctttactgtgttagctctttgaatgttcttgaaattttagactttctttgtaaacaaatgatatgtccttatcattgtataaaagctgttatgtgcaacagtgtggagattccttgtctgatttaataaaatacttaaacactgaaaaaaaaaaaaaaaaaaaaaaaaaaaaaaaaaaaaaaaaaaaaaaaaaaaaaaaaaaaaaaaaaaaaaaaaaaaaaaaaagtaccttctgaggcggaaagaaccagccggatctcgacttcgagcttatttatattccaaaaaaaaaaaataaaatttcaatttttaagctttcactaattccaaacccacccgctttttatagtaagtttttcacccataaataataaatacaataattaatttctcgtaaaagtagaaaatatattctaatttattgcacggtaaggaagtagatcataactcgagcatgggagatcccgtcgttttacaacgtcgtgactgggaaaaccctggcgttacccaacttaatcgccttgcagcacatccccctttcgccagctggcgtaatagcgaagaggcccgcaccgatcgcccttcccaacagttgcgcagcctgaatggcgaatggcgctttgcctggtttccggcaccagaagcggtgccggaaagctggctggagtgcgatcttcctgaggccgatactgtcgtcgtcccctcaaactggcagatgcacggttacgatgcgcccatctacaccaacgtgacctatcccattacggtcaatccgccgtttgttcccacggagaatccgacgggttgttactcgctcacatttaatgttgatgaaagctggctacaggaaggccagacgcgaattatttttgatggcgttaactcggcgtttcatctgtggtgcaacgggcgctgggtcggttacggccaggacagtcgtttgccgtctgaatttgacctgagcgcatttttacgcgccggagaaaaccgcctcgcggtgatggtgctgcgctggagtgacggcagttatctggaagatcaggatatgtggcggatgagcggcattttccgtgacgtctcgttgctgcataaaccgactacacaaatcagcgatttccatgttgccactcgctttaatgatgatttcagccgcgctgtactggaggctgaagttcagatgtgcggcgagttgcgtgactacctacgggtaacagtttctttatggcagggtgaaacgcaggtcgccagcggcaccgcgcctttcggcggtgaaattatcgatgagcgtggtggttatgccgatcgcgtcacactacgtctgaacgtcgaaaacccgaaactgtggagcgccgaaatcccgaatctctatcgtgcggtggttgaactgcacaccgccgacggcacgctgattgaagcagaagcctgcgatgtcggtttccgcgaggtgcggattgaaaatggtctgctgctgctgaacggcaagccgttgctgattcgaggcgttaaccgtcacgagcatcatcctctgcatggtcaggtcatggatgagcagacgatggtgcaggatatcctgctgatgaagcagaacaactttaacgccgtgcgctgttcgcattatccgaaccatccgctgtggtacacgctgtgcgaccgctacggcctgtatgtggtggatgaagccaatattgaaacccacggcatggtgccaatgaatcgtctgaccgatgatccgcgctggctaccggcgatgagcgaacgcgtaacgcgaatggtgcagcgcgatcgtaatcacccgagtgtgatcatctggtcgctggggaatgaatcaggccacggcgctaatcacgacgcgctgtatcgctggatcaaatctgtcgatccttcccgcccggtgcagtatgaaggcggcggagccgacaccacggccaccgatattatttgcccgatgtacgcgcgcgtggatgaagaccagcccttcccggctgtgccgaaatggtccatcaaaaaatggctttcgctacctggagagacgcgcccgctgatcctttgcgaatacgcccacgcgatgggtaacagtcttggcggtttcgctaaatactggcaggcgtttcgtcagtatccccgtttacagggcggcttcgtctgggactgggtggatcagtcgctgattaaatatgatgaaaacggcaacccgtggtcggcttacggcggtgattttggcgatacgccgaacgatcgccagttctgtatgaacggtctggtctttgccgaccgcacgccgcatccagcgctgacggaagcaaaacaccagcagcagtttttccagttccgtttatccgggcaaaccatcgaagtgaccagcgaatacctgttccgtcatagcgataacgagctcctgcactggatggtggcgctggatggtaagccgctggcaagcggtgaagtgcctctggatgtcgctccacaaggtaaacagttgattgaactgcctgaactaccgcagccggagagcgccgggcaactctggctcacagtacgcgtagtgcaaccgaacgcgaccgcatggtcagaagccgggcacatcagcgcctggcagcagtggcgtctggcggaaaacctcagtgtgacgctccccgccgcgtcccacgccatcccgcatctgaccaccagcgaaatggatttttgcatcgagctgggtaataagcgttggcaatttaaccgccagtcaggctttctttcacagatgtggattggcgataaaaaacaactgctgacgccgctgcgcgatcagttcacccgtgcaccgctggataacgacattggcgtaagtgaagcgacccgcattgaccctaacgcctgggtcgaacgctggaaggcggcgggccattaccaggccgaagcagcgttgttgcagtgcacggcagatacacttgctgatgcggtgctgattacgaccgctcacgcgtggcagcatcaggggaaaaccttatttatcagccggaaaacctaccggattgatggtagtggtcaaatggcgattaccgttgatgttgaagtggcgagcgatacaccgcatccggcgcggattggcctgaactgccagctggcgcaggtagcagagcgggtaaactggctcggattagggccgcaagaaaactatcccgaccgccttactgccgcctgttttgaccgctgggatctgccattgtcagacatgtataccccgtacgtcttcccgagcgaaaacggtctgcgctgcgggacgcgcgaattgaattatggcccacaccagtggcgcggcgacttccagttcaacatcagccgctacagtcaacagcaactgatggaaaccagccatcgccatctgctgcacgcggaagaaggcacatggctgaatatcgacggtttccatatggggattggtggcgacgactcctggagcccgtcagtatcggcggaattccagctgagcgccggtcgctaccattaccagttggtctggtgtcaaaaataataataaccgggcaggggggatccaattctgtgagcgtatggcaaacgaaggaaaaatagttatagtagccgcactcgatgggacatttcaacgtaaaccgtttaataatattttgaatcttattccattatctgaaatggtggtaaaactaactgctgtgtgtatgaaatgctttaaggaggcttccttttctaaacgattgggtgaggaaaccgagatagaaataataggaggtaatgatatgtatcaatcggtgtgtagaaagtgttacatcgactcataatattatattttttatctaaaaaactaaaaataaacattgattaaattttaatataatacttaaaaatggatgttgtgtcgttagataaaccgtttatgtattttgaggaaattgataatgagttagattacgaaccagaaagtgcaaatgaggtcgcaaaaaaactgccgtatcaaggacagttaaaactattactaggagaattattttttcttagtaagttacagcgacacggtatattagatggtgccaccgtagtgtatataggatctgctcccggtacacatatacgttatttgagagatcatttctataatttaggagtgatcatcaaatggatgctaattgacggccgccatcatgatcctattttaaatggattgcgtgatgtgactctagtgactcggttcgttgatgaggaatatctacgatccatcaaaaaacaactgcatccttctaagattattttaatttctgatgtgagatccaaacgaggaggaaatgaacctagtacggcggatttactaagtaattacgctctacaaaatgtcatgattagtattttaaaccccgtggcgtctagtcttaaatggagatgcccgtttccagatcaatggatcaaggacttttatatcccacacggtaataaaatgttacaaccttttgctccttcatattcagctgaaatgagattattaagtatttataccggtgagaacatgagactgactcgagttaccaaattagacgctgtaaattatgaaaaaaagatgtactaccttaataagatcgtccgtaacaaagtagttgttaactttgattatcctaatcaggaatatgactattttcacatgtactttatgctgaggaccgtgtactgcaataaaacatttcctactactaaagcaaaggtactatttctacaacaatctatatttcgtttcttaaatattccaacaacatcaactgaaaaagttagtcatgaaccaatacaacgtaaaatatctagcaaaaattctatgtctaaaaacagaaatagcaagagatccgtacgcggtaataaatagaaacgtactactgagatatactaccgatatagagtataatgatttagttactttaataaccgttagacataaaattgattctatgaaaactgtgtttcaggtatttaacgaatcatccataaattatactccggttgatgatgattatggagaaccaatcattataacatcgtatcttcaaaaaggtcataacaagtttcctgtaaattttctatacatagatgtggtaatatctgacttatttcctagctttgttagactagatactacagaaactaatatagttaatagtgtactacaaacaggcgatggtaaaaagactcttcgtcttcccaaaatgttagagacggaaatagttgtcaagattctctatcgccctaatataccattaaaaattgttagatttttccgcaataacatggtaactggagtagagatagccgatagatctgttatttcagtcgctgattaatcaattagtagagatgagataagaacattataataatcaataatatatcttatatcttatatcttatatcttatatcttgtttagaaaaatgctaatattaaaatagctaacgctagtaatccaatcggaagccatttgatatctataatagggtatctaatttcctgatttaaatagcggacagctatattctcggtagctactcgtttggaatcacaaacattatttacatctaatttactatctgtaatggaaacgtttcccaatgaaatggtacaatccgatacattgcattttgttatatttttttttaaagaggctggtaacaacgcatcgcttcgtttacatggctcgtaccaacaataatagggtaatcttgtatctattcctatccgtactatgcttttatcaggataaatacatttacatcgtatatcgtctttgttagcatcacagaatgcataaatttgttcgtccgtcatgataaaaatttaaagtgtaaatataactattatttttatagttgtaataaaaagggaaatttgattgtatactttcggttctttaaaagaaactgacttgataaaaatggctgtaatctctaaggttacgtatagtctatatgatcaaaaagagattaatgctacagatattatcattagtcatgttaaaaatgacgacgatatcggtaccgttaaagatggtagactaggtgctatggatggggcattatgtaagacttgtgggaaaacggaattggaatgtttcggtcactggggtaaagtaagtatttataaaactcatatagttaagcctgaatttatttcagaaattattcgtttactgaatcatatatgtattcactgcggattattgcgttcacgagaaccgtattccgacgatattaacctaaaagagttatcgggacacgctcttaggagattaaaggataaaatattatccaagaaaaagtcatgttggaacagtgaatgtatgcaaccgtatcaaaaaattactttttcaaagaaaaaggtttgtttcgtcaacaagttggatgatattaacgttcctaattctctcatctatcaaaagttaatttctattcatgaaaagttttggccattattagaaattcatcaatatccagctaacttattttatacagactactttcccatccctccgttgattattagaccggctattagtttttggatagatagtatacccaaagagaccaatgaattaacttacttattaggtatgatcgttaagaattgtaacttgaatgctgatgaacaggttatccagaaggcggtaatagaatacgatgatattaaaattatttctaataacactaccagtatcaatttatcatatattacatccggcaaaaataatatgattagaagttatatcgtcgcccgacgaaaagatcagaccgctagatctgtaattggtcccagtacatctatcaccgttaatgaggtaggaatgcccgcatatattagaaatacacttacagaaaagatatttgttaatgcctttacagtggataaagttaaacaactattagcgtcaaaccaagttaaattttactttaataaacgattaaaccaattaacaagaatacgccaaggaaagtttattaaaaataaaatacatttattgcctggtgattgggtagaagtagctgttcaagaatatacaagtattatttttggaagacagccgtctctacatagatacaacgtcatcgcttcatctatcagagctaccgaaggagatactatcaaaatatctcccggaattgccaactctcaaaatgctgatttcgacggggatgaggaatggatgatattagaacaaaatcctaaagctgtaattgaacaaagtattcttatgtatccgacgacgttactcaaacacgatattcatggagcccccgtttatggatctattcaagatgaaatcgtagcagcgtattcattgtttaggatacaagatctttgtttagatgaagtattgaacatcttggggaaatatggaagagagttcgatcctaaaggtaaatgtaaattcagcggtaaagatatctatacttacttgataggtgaaaagattaattatccgggtctcttaaaggatggtgaaattattgcaaacgacgtagatagtaattttgttgtggctatgaggcatctgtcattggctggactcttatccgatcataagtcgaacgtggaaggtatcaactttattatcaagtcatcttatgtttttaagagatatctatctatttacggttttggggtgacattcaaagatctgagaccaaattcgacgttcactaataaattggaggccatcaacgtagaaaaaatagaacttatcaaagaagcatacgccaaatatctcaacgatgtaagagacgggaaaatagttccattatctaaagctttagaggcggactatgtggaatccatgttatccaacttgacaaatcttaatatccgagagatagaagaacatatgagacaaacgctgatagatgatccagataataacctcctgaaaatggccaaagcgggttataaagtaaatcccacagaactaatgtatattctaggtacgtatggacaacaaaggattgatggtgaaccagcagagactcgagtattgggtagagttttaccttactatcttccagactctaaggatccagaaggaagaggttacattcttaattctttaacaaaaggattaacgggttctcaatattacttttcgatgctggttgccagatctcaatctactgatatcgtctgtgaaacatcacgtaccggaacactggctagaaaaatcattaaaaagatggaggatatggtggtcgacggatacggacaagtagttataggtaatacgctcatcaagtacgccgccaattataccaaaattctaggctcagtatgtaaacctgtagatcttatctatccagatgagtccatgacttggtatttggaaattagtgctctgtggaataaaataaaacagggattcgtttactctcagaaacagaaacttgcaaagaagacattggcgccgtttaatttcctagtattcgtcaaacccaccactgaggataatgctattaaggttaaggatctgtacgatatgattcataacgtcattgatgatgtgagagagaaatacttctttacggtatctaatatagattttatggagtatatattcttgacgcatcttaatccttctagaattagaattacaaaagaaacggctatcactatctttgaaaagttctatgaaaaactcaattatactctaggtggtggaactcctattggaattatttctgcacaggtattgtctgagaagtttacacaacaagccctgtccagttttcacactactgaaaaaagtggtgccgtcaaacaaaaacttggtttcaacgagtttaataacttgactaatttgagtaagaataagaccgaaattatcactctggtatccgatgatatctctaaacttcaatctgttaagattaatttcgaatttgtatgtttgggagaattaaatccaaacatcactcttcgaaaagaaacagataaatatgtagtagatataatagtcaatagattatacatcaagagagcagaaataaccgaattagtcgtcgaatatatgattgaacgatttatctcctttagcgtcattgtaaaggaatggggtatggagacattcattgaggacgaggataatattagatttactgtctacctaaatttcgttgaaccggaagaattgaatcttagtaagtttatgatggttcttccgggggcagccaacaagggaaagattagtaaattcaagattcctatctctgattatacgggatatgacgacttcaatcaaacaaaaaagctcaataagatgactgtagaactcatgaatctaaaagaattgggttctttcgatttggaaaacgtcaacgtgtatcctggagtatggaatacatacgatatcttcggtatcgaggccgctcgtgaatacttgtgcgaagccatgttaaacacctatggagaagggttcgattatctgtatcagccttgtgatcttctcgctagtttactatgtgctagttacgaaccagaatcagtgaataaattcaagttcggcgcagctagtactcttaagagagctacgttcggagacaataaagcattgttaaacgcggctcttcataaaaagtcagaacctattaacgataatagtagctgccacttttttagcaaggtccctaatataggaactggatattacaaatactttatcgacttgggtcttctcatgagaatggaaaggaaactatctgataagatatcttctcaaaagatcaaggaaatggaagaaacagaagacttttaattcttatcaataacatatttttctatgatctgtcttttaaacgatggattttccacaaatgcgcctctcaagtccctcatagaatgatacacgtataaaaaatatagcataggcaatgactccttatttttagacattagatatgccaaaatcatagccccgcttctatttactcccgcagcacaatgaaccaacacgggctcgtttcgttgatcacatttagataaaaaggcggttacgtcgtcaaaatatttactaatatcggtagttgtatcatctaccaacggtatatgaataatattaatattagagttaggtaatgtatatttatccatcgtcaaatttaaaacatatttgaacttaacttcagatgatggtgcatccatagcatttttataatttcccaaatacacattattggttacccttgtcattatagtgggagatttggctttgtgcatatctccagttgaacgtagtagtaagtatttatacaaacttttcttatccatttataacgtacaaatggataaaactactttatcggtaaacgcgtgtaatttagaatacgttagagaaaaggctatagtaggcgtacaagcagccaaaacatcaacacttatattctttgttattatattggcaattagtgcgctattactctggtttcagacgtctgataatccagtctttaatgaattaacgagatatatgcgaattaaaaatacggttaacgattggaaatcattaacggatagcaaaacaaaattagaaagtgatagaggtagacttctagccgctggtaaggatgatatatttgaattcaaatgtgtggatttcggcgcctattttatagctatgcgattggataagaaaacatatctgccgcaagctattaggcgaggtactggagacgcgtggatggttaaaaaggcggcaaaggtcgatccatctgctcaacaattttgtcagtatttgataaaacacaagtctaataatgttattacttgtggtaatgagatgttaaatgaattaggttatagcggttattttatgtcaccgcattggtgttccgattttagtaatatggaatagtgttagataaatgcggtaacgaatgttcctgtaaggaaccataacagcttagatttaacgttaaagatgagcataaacataataaacaaaattacaatcaaacttataacattaatatcaaacaatccaaaaaatgaaatcagtggagtagtaaacgcgtacataactcctggataacgtttagcagctgccgttcctattctagaccaaaaattcggtttcatgttttcgaaacggtattctgcaacaagtcgaggatcgtgttctacatatttggcggcattatccagtatctgcctattgatcttcatttcgttttcgattctggctatttcaaaataaaatcccgatgatagacctccagactttataatttcatctacgatgttcagcgccgtagtaactctaataatataggctgataagctaacatcataccctcctgtatatgtgaatatggcatgatttttgtccattacaagctcggttttaactttattgcctgtaataatttctctcatctgtaggatatctatttttttgtcatgcattgccttcaagacgggacgaagaaacgtaatatcctcaataacgttatcgttttctacaataactacatattctacctttttattttctaactcggtaaaaaaattagaatcccatagggctaaatgtctagcgatatttcttttcgtttcctctgtacacatagtgttacaaaaccctgaaaagaagtgagtatacttgtcatcatttctaatgtttcctccagtccactgtataaacgcataatccttgtaatgatctggatcatccttgactaccacaacatttcttttttctggcataacttcgttgtcctttacatcatcgaacttctgatcattaatatgctcatgaacattaggaaatgtttctgatggaggtctatcaataactggcacaacaataacaggagttttcaccgccgccatttagttattgaaattaatcatatacaactctttaatacgagttatattttcgtctatccattgtttcacattgacatatttcgacaaaaagatataaaatgcgtattccaatgcttctctgtttaatgaattactaaaatatacaaacacgtcactgtctggcaataaatgatatcttagaatattgtaacaatttattttgtattgcacatgttcgtgatctatgagttcttcttcgaatggcataggatctccgaatctgaaaacgtataaataggagttagaataataatatttgagagtattggtaatatataaactctttagcggtataattagtttttttctctcaatttctatttttagatgtgatggaaaaatgactaattttgtagcattagtatcatgaactctaatcaaaatcttaatatcttcgtcacacgttagctctttgaagtttttaagagatgcatcagttggttctacagatggagtaggtgcaacaattttttgttctacacatgtatgtactggagccattgttttaactataatggtgcttgtatcgaaaaactttaatgcagatagcggaagctcttcgccgcgactttctacgtcgtaattgggttctaacgccgatctctgaatggatactagttttctaagttctaatgtgattctctgaaaatgtaaatccaattcctccggcattatagatgtgtatacatcggtaaataaaactatagtatccaacgatcccttctcgcaaattctagtcttaaccaaaaaatcgtatataaccacggagatggcgtatttaagagtggattcttctaccgttttgttcttggatgtcatataggaaactataaagtccgcactactgttaagaatgattactaacgcaactatatagtttaaattaagcattttggaaacataaaataactctgtagacgatacttgactttcgaataagtttgcagacaaacgaagaaagaacagacctctcttaatttcagaagaaaactttttttcgtattcctgacgtctagagtttatatcaataagaaagttaagaattagtcggttaatgttgtatttcattacccaagtttgagatttcataatattatcaaaagacatgataatattaaagataaagcgctgactatgaacgaaatagctatatggttcgctcaagaatatagtcttgttaaacgtggaaacgataactgtatttttaatcacgtcagcggcatctaaattaaatataggtatatttattccacacactctacaatatgccacaccatcttcataataaataaattcgttagcaaaattattaattttagtgaaatagttagcgtcaactttcatagcttccttcaatctaatttgatgctcacacggtgcgaattccactctaacatcccttttccatgcctcaggttcatcgatctctataatatctagttttttgcgtttcacaaacacaggctcgtctctcgcgatgagatctgtatagtaactatgtaaatgataactagatagaaagatgtagctatatagatgacgatcctttaagagaggtataataactttaccccaatcagatagactgttgttatggtcttcggaaaaagaatttttataaatttttccagtattttccaaatatacgtacttaacatctaaaaaatccttaatgataataggaatggataatccgtctattttataaagaaatacatatcgcacattatacttttttttggaaatgggaataccgatgtgtctacataaatatgcaaagtctaaatattttttagagaatcttagttggtccaaattcttttccaagtacggtaatagatttttcatattgaacggtatcttcttaatctctggttctagttccgcattaaatgatgaaactaagtcactatttttataactaacgattacatcacctctaacatcatcatttaccagaatactgatcttcttttgtcgtaaatacatgtctaatgtgttaaaaaaaagatcatacaagttatacgtcatttcatctgtggtattcttgtcattgaaggataaactcgtactaatctcttctttaacagcctgttcaaatttatatcctatatacgaaaaaatagcaaccagtgtttgatcatccgcgtcaatattctgttctatcgtagtgtataacaatcgtatatcttcttctgtgatagtcgatacgttataaaggttgataacgaaaatatttttatttcgtgaaataaagtcatcgtaggattttggacttatattcgcgtctagtagatatgcttttatttttggaatgatctcaattagaatagtctctttagagtccatttaaagttacaaacaactaggaaattggtttatgatgtataatttttttagtttttatagattctttattctatacttaaaaaatgaaaataaatacaaaggttcttgagggttgtgttaaattgaaagcgagaaataatcataaattatttcattatcgcgatatccgttaagtttgtatcgtaatggcgtggtcaattacgaataaagcggatactagtagcttcacaaagatggctgaaatcagagctcatctaaaaaatagcgctgaaaataaagataaaaacgaggatattttcccggaagatgtaataattccatctactaagcccaaaaccaaacgagccactactcctcgtaaaccagcggctactaaaagatcaaccaaaaaggaggaagtggaagaagaagtagttatagaggaatatcatcaaacaactgaaaaaaattctccatctcctggagtcagcgacattgtagaaagcgtggccgctgtagagctcgatgatagcgacggggatgatgaacctatggtacaagttgaagctggtaaagtaaatcatagtgctagaagcgatctctctgacctaaaggtggctaccgacaatatcgttaaagatcttaagaaaattattactagaatctctgcagtatcgacggttctagaggatgttcaagcagctggtatctctagacaatttacttctatgactaaagctattacaacactatctgatctagtcaccgagggaaaatctaaagttgttcgtaaaaaagttaaaacttgtaagaagtaaatgcgtgcacttttttataaagatggtaaactctttaccgataataattttttaaatcctgtatcagacgataatccagcgtatgaggttttgcaacatgttaaaattcctactcatttaacagatgtagtagtatatgaacaaacgtgggaggaggcgttaactagattaatttttgtgggaagtgattcaaaaggacgtagacaatacttttacggaaaaatgcatgtacagaatcgcaacgctaaaagagatcgtatttttgttagagtatataacgttatgaaacgaattaattgttttataaacaaaaatataaagaaatcgtccacagattccaattatcagttggcggtttttatgttaatggaaactatgttttttattagatttggtaaaatgaaatatcttaaggagaatgaaacagtagggttattaacactaaaaaataaacacatagaaataagtcccgatgaaatagttatcaagtttgtaggaaaggacaaagtttcacatgaatttgttgttcataagtctaatagactatataaaccgctattgaaactgacggatgattctagtcccgaagaatttctgttcaacaaactaagtgaacgaaaggtatacgaatgtatcaaacagtttggtattagaatcaaggatctccgaacgtatggagtcaattatacgtttttatataatttttggacaaatgtaaagtccatatctcctcttccgtcaccaaaaaagttaatagcattaactatcaaacaaactgctgaagtggtaggtcatactccatcaatttcaaaaagagcttatatggcaacgactattttagaaatggtaaaggataaaaattttttagatgtagtatctaaaactacgttcgatgaattcctatctatagtcgtagatcacgttaaatcatctacggatggatgatatagatctttacacaaataattacaagaccgataaatggaaatggataagcgtatgaaatctctcgcaatgacagctttcttcggagagctaagcacattagatattatggcattgataatgtctatatttaaacgccatccaaacaataccattttttcagtggataaggatggtcagtttatgattgatttcgaatacgataattataaggcttctcaatatttggatctgaccctcactccgatatctggagatgaatgcaagactcacgcatcgagtatagccgaacaattggcgtgtgcggatattattaaagaggatattagcgaatatatcaaaactactccccgtcttaaacgatttataaaaaaataccgcaatagatcagatactcgtatcagtcgagatacagaaaagcttaaaatagctctagctaaaggcatagattacgaatatataaaagacgcttgttaataagtaaatgaaaaaaaactagtcgtttataataaaacacgatatggatgccaacgtagtatcattttctactattgcgacgtatatagacgctttagcgaagaatgcttcggaattagaacagaggtctaccgcatacgaaataaataatgaattggaactagtatttattaagccgccattgattactttgacaaatgtagtgaatatctctacgattcaggaatcgtttattcgatttaccgttactaataaggaaggtgttaaaattagaactaagattccattatctaaggtacatggtctagatgtaaaaaatgtacagttagtagatgctatagataacatagtttgggaaaagaaatcattagtgacggaaaatcgtcttcacaaagaatgcttgttgagactatcgacagaggaacgtcatatatttttggattacaagaaatatggatcctctatccgactagaattagtcaatcttattcaagcaaaaacaaaaaactttacgatagactttaagctaaaatattttctaggatccggtgcccagtctaaaagttctttgttgcacgctattaatcatccaaagtcaaggcctaatacatctctggaaatagaattcacacctagagacaatgaaacagttccatatgatgaactaataaaggaattgacgactctctcgcgtcatatatttatggcttctccagagaatgtaattctttctccgcctattaacgcgcctataaaaacctttatgttgcctaaacaagatatagtaggtttggatctggaaaatctatatgccgtaactaagactgacggcattcctataactatcagagttacatcaaacgggttgtattgttattttacacatcttggttatattattagatatcctgttaagagaataatagattccgaagtagtagtctttggtgaggcagttaaggataagaactggaccgtatatctcattaagctaatagagcctgtgaatgcaatcaatgatagactagaagaaagtaagtatgttgaatctaaactagtggatatttgtgatcggatagtattcaagtcaaagaaatacgaaggtccgtttactacaactagtgaagtcgtcgatatgttatctacatatttaccaaagcaaccagaaggtgttattctgttctattcaaagggacctaaatctaacattgattttaaaattaaaaaggaaaatactatagaccaaactgcaaatgtagtatttaggtacatgtccagtgaaccaattatctttggagaatcgtctatctttgtagagtataagaaatttagcaacgataaaggctttcctaaagaatatggttctggtaagattgtgttatataacggcgttaattatctaaataatatctattgtttggaatatattaatacacataatgaagtgggtattaagtccgtggttgtacctattaagtttatagcagaattcttagttaatggagaaatacttaaacctagaattgataaaaccatgaaatatattaactcagaagattattatggaaatcaacataatatcatagtcgaacatttaagagatcaaagcatcaaaataggagatatctttaacgaggataaactatcggatgtgggacatcaatacgccaataatgataaatttagattaaatccagaagttagttattttacgaataaacgaactagaggaccgttgggaattttatcaaactacgtcaagactcttcttatttctatgtattgttccaaaacatttttagacgattccaacaaacgaaaggtattggcgattgattttggaaacggtgctgacctggaaaaatacttttatggagagattgcgttattggtagcgacggatccggatgctgatgctatagctagaggaaatgaaagatacaacaaattaaactctggaattaaaaccaagtactacaaatttgactacattcaggaaactattcgatccgatacatttgtctctagtgtcagagaagtattctattttggaaagtttaatatcatcgactggcagtttgctatccattattcttttcatccgagacattatgctaccgtcatgaataacttatccgaactaactgcttctggaggcaaggtattaatcactaccatggacggagacaaattatcaaaattaacagataaaaagacttttataattcataagaatttacctagtagcgaaaactatatgtctgtagaaaaaatagctgatgatagaatagtggtatataatccatcaacaatgtctactccaatgactgaatacattatcaaaaagaacgatatagtcagagtgtttaacgaatacggatttgttcttgtagataacgttgatttcgctacaattatagaacgaagtaaaaagtttattaatggcgcatctacaatggaagatagaccgtctacaaaaaactttttcgaactaaatagaggagccattaaatgtgaaggtttagatgtcgaagacttacttagttactatgttgtttatgtcttttctaagcggtaaataataatatggtatgggttctgatctcccagttctaaatgcattaaataattccaatagagcgatttttgttcctataggaccttccaactgtggatactctgtattgttaatagatatattaatacttttgtcgggtaacagaggttctacgtcttctaaaaataaaagttttataacatctggcctgttcataaataaaaacttggcgattctatatatactcttattatcaaatctagccattgtcttatagatgtgagctactgtaggtgtaccatttgattttctttctaatactatatatttctctcgaagaagttcttgcacatcatctgggaataaaatactactgttgagtaaatcagttattttttttatatcgatattgatggacatttttatagttaaggataataagtatcccaaagtcgataacgacgataacgaagtatttatacttttaggaaatcacaatgactttatcagattaaaattaacaaaattaaaggagcatgtatttttttctgaatatattgtgactccagatacatatggatctttatgcgtcgaattaaatgggtctagttttcagcacggcggtagatatatagaggtggaggaatttatagatgctggaagacaagttagatggtgttctacatccaatcatatatctaaagatatacccgaagatatgcacactgataaatttgtcatttatgatatttatacgtttgattcgttcaagaataaacgattggtattcgtacaggtacctccgtcgttaggagatgatagtcatttgactaatccgttattgtcaccgtattatcgtaattcagtagccagacaaatggtcaatgatatgatttttaatcaagattcatttttaaaatatttattagaacatctgattagaagccactatagagtttctaaacatataacaatagttagatacaaggataccgaagaattaaatctaacgagaatatgttataatagagataagtttaaggcgtttgtattcgcttggtttaacggcgtttcggaaaatgaaaaggtactagatacgtataaaaaggtatctaatttgatataatgaattcagtgactgtatcacacgcgccatatactattacttatcacgatgattgggaaccagtaatgagtcaattggtagagttttataacgaagtagccagttggctgctacgagacgagacgtcgcctattcctgataagttctttatacagttgaaacaaccgcttagaaataaacgagtatgtgtgtgtggtatagatccgtatccgaaagatggaactggtgtaccgttcgaatcaccaaattttacaaaaaaatcaattaaggagatagcttcatctatatctagattaaccggagtaattgattataaaggttataaccttaatataatagacggggttataccctggaattattacttaagttgtaaattaggagaaacaaaaagtcacgcgatttactgggataagatttccaagttactgctgcagcatataactaaacacgttagtgttctttattgtttgggtaaaacagatttctcgaatatacgggccaagttagaatccccggtaactaccatagtcggatatcatccagcggctagagaccgccaattcgagaaagatagatcatttgaaattatcaacgttttactggaattagacaacaaggcacctataaattgggctcaagggtttatttattaatgctttagtgaaattttaacttgtgttctaaatggatgcggctattagaggtaatgatgttatctttgttcttaagactataggtgtcccgtcagcgtgcagacaaaatgaagatccaagatttgtagaagcatttaaatgcgacgagttagaaagatatattgagaataatccagaatgtacactattcgaaagtcttagggatgaggaagcatactctatagtcagaattttcatggatgtagatttagacgcgtgtctagacgaaatagattatttaacggccattcaagattttattatcgaggtgtcaaactgtgtagctagattcgcgtttacagaatgcggcgccattcatgaaaatgtaataaaatccatgagatctaatttttcattgactaagtctacaaatagagataaaacaagttttcatattatctttttagatacgtataccactatggatacattgatagctatgaaacgaacactattagaattaagtagatcatctgaaaatccactaaccagatcgatagacactgccgtatataggagaaaaacaactcttcgggttgtaggtactaggaaaaatccaaattgcgacactattcatgtaatgcaaccaccgcatgataatatagaagattacctattcacttacgtggatatgaacaacaatagttattacttttctctacaacaacgattggaggatttagttcctgataagttatgggaaccagggtttatttcattcgaagacgctataaaaagagtttcaaaaatattcattaattctataataaactttaatgatctcgatgaaaataattttacaacggtaccactggtcatagattacgtaacaccttgtgcattatgtaaaaaacgatcgcataaacatccgcatcaactatcgttggaaaatggtgctattagaatttacaaaactggtaatccacatagttgtaaagttaaaattgttccgttggatggtaataaactgtttaatattgcacaaagaattttagacactaactctgttttattaaccgaacgaggagaccatatagtttggattaataattcatggaaatttaacagcgaagaacccttgataacaaaactaattttgtcaataagacatcaactacctaaggaatattcaagcgaattactctgtccaagaaaacgaaagactgtagaagctaacatacgagacatgttagtagattcagtggagaccgatacctatccggataaacttccgtttaaaaatggtgtattggacctggtagacggaatgttttactctggagatgatgctaaaaaatatacgtgtactgtatcaaccggatttaaatttgacgatacaaagttcgtcgaagacagtccagaaatggaagagttaatgaatatcattaacgatatccaaccattaacggatgaaaataagaaaaatagagagctatatgaaaaaacattatctagttgtttatgcggtgctaccaaaggatgtttaacattcttttttggagaaactgcaactggaaagtcgacaaccaaacgtttgttaaagtctgctatcggtgacctgtttgttgagacgggtcaaacaattttaacagatgtattggataaaggacctaatccatttatcgctaacatgcatttgaaaagatctgtattctgtagcgaactacctgattttgcctgtagtggatcaaagaaaattagatctgacaatattaaaaagttgacagaaccttgtgtcattggaagaccgtgtttctccaataaaattaataatagaaaccatgcgacaatcattatcgatactaattacaaacctgtttttgataggatagataacgcattaatgagaagaattgccgtcgtgcgattcagaacacacttttctcaaccttctggtagagaggctgctgaaaataatgacgcgtacgataaagtcaaactattagacgaggggttagatggtaaaatacaaaataatatatatagatttgcatttctatacttgttggtgaaatggtacaaaaaatatcatgttcctattatgaaactatatcctacacccgaagagattcctgactttgcattctatctcaaaataggtactctgttggtatctagctctgtaaagcatattccattaatgacggacctctccaaaaagggatatatattgtacgataatgtggtcactcttccgttgactactttccaacagaaaatatccaagtattttaattctagactatttggacacgatatagagagcttcatcaatagacataagaaatttgccaatgttagtgatgaatatctgcaatatatattcatagaggatatttcatctccgtaaatatatgctcatatatttatagaagatatcacatatctaaatgaataccggaatcatagatttatttgataatcatgttgatagtataccaactatattacctcatcagttagctactctagattatctagttagaactatcatagatgagaacagaagcgtgttattgttccatattatgggatcaggtaaaacaataatcgctttgttgttcgccttggtagcttccagatttaaaaaggtttacattctagtgccgaacatcaacatcttaaaaattttcaattataatatgggtgtagctatgaacttgtttaatgacgaattcatagctgagaatatctttattcattccacaacaagtttttattctcttaattataacgataacgtcattaattataacggattatctcgctacaataactctatttttatcgttgatgaggcacataatatctttgggaataatactggagaacttatgaccgtgataaaaaataaaaacaagattccttttttactattgtctggatctcccattactaacacacctaatactctgggtcatattatagatttaatgtccgaagagacgatagattttggtgaaattattagtcgtggtaagaaagtaattcagacacttcttaacgaacgcggtgtgaatgtacttaaggatttgcttaaaggaagaatatcatattacgaaatgcctgataaagatctaccaacgataagatatcacggacgtaagtttctagatactagagtagtatattgtcacatgtctaaacttcaagagagagattatatgattactagacgacagctatgttatcatgaaatgtttgataaaaatatgtataacgtgtcaatggcagtattgggacaacttaatctgatgaataatttagatactttatttcaggaacaggataaggaattgtacccaaatctgaaaataaataatggcgtgttatacggagaagaattggtaacgttaaacattagttccaaatttaaatactttattaatcggatacagacactcaacggaaaacattttatatacttttctaattctacatatggcggattggtaattaaatatatcatgctcagtaatggatattctgaatataatggttctcagggaactaatccacatatgataaacggcaaaccaaaaacatttgctatcgttactagtaaaatgaaatcgtctttagaggatctattagatgtgtataattctcctgaaaacgatgatggtagtcaattgatgtttttgttttcatcaaacattatgtccgaatcctatactctaaaagaggtaaggcatatttggtttatgactatcccagatactttttctcaatacaaccaaattcttggacgatctattagaaaattctcttacgccgatatttctgaaccagttaatgtatatcttttagccgccgtatattccgatttcaatgacgaagtgacgtcattaaacgattacacacaggatgaattaattaatgttttaccatttgacatcaaaaagctgttgtatctaaaatttaagacgaaagaaacgaatagaatatactctattcttcaagagatgtctgaaacgtattctcttccaccacatccatcaattgtaaaagttttattgggagaattggtcagacaatttttttataataattctcgtattaagtataacgataccaagttacttaaaatggttacatcagttataaaaaataaagaagacgctaggaattacatagatgatattgtaaacggtcacttctttgtatcgaataaagtatttgataaatctcttttatacaaatacgaaaacgatattattacagtaccgtttagactttcctacgaaccatttgtttggggagttaactttcgtaaagaatataacgtggtatcttctccataaaactgatgagatatataaagaaataaatgtcgagctttgttaccaatggatacctttccgttacattggaaccacacgagctgacgttagacataaaaactaatattaggaatgccgtatataagacgtatctccatagagaaattagtggtaaaatggccaagaaaatagaaattcgtgaagacgtggaattacctctcggcgaaatagttaataattctgtagttataaacgttccgtgtgtaataacctacgcgtattatcacgttggggatatagtcagaggaacattaaacatcgaagatgaatcaaatgtaactattcaatgtggagatttaatctgtaaactaagtagagattcgggtactgtatcatttagcgattcaaagtactgcttttttcgaaatggtaatgcgtatgacaatggcagcgaagtcactgccgttctaatggaggctcaacaaggtatcgaatctagttttgtttttctcgcgaatatcgtcgactcataaaaaagagaatagcggtaagtataaacacgaatactatggcaataattgcgaatgttttattctcttcgatatatttttgataatatgaaaaacatgtctctctcaaatcggacaaccatctcataaaatagttctcgcgcgctggagaggtagttgccgctcgtataatctctccagaataatatacttgcgtgtcgtcgttcaatttatacggatttctatagttctctgttatataatgcggtttgccctcatgattagacgacgacaatagtgttctaaatttagatagttgatcagaatgaatgtttattggcgttggaaaaattatccatacagcgtctgcagagtggttgatagttgttcctagatatgtaaaataatccaacttactaggcagcaaattgtctagataaaatactgaatcaaacggtgcagacgtattggcggatctaatggaatccaattgattaactatcttttgaaaatatacatttttatgatccaatacttgtaagaatatagaaataatgataagtccatcatcgtgtttttttgcctcttcataagaactatattttttcttattccaatgaacaagattaatctctccagagtatttgtacacatctatcaagtgattggatccataatcgtcttcctttccccaatatatatgtagtgatgataacacatattcattggggagaaaccctccacttatatatcctcctttaaaattaatccttactagttttccagtgttctggatagtggttggtttcgactcattataatgtatgtctaacggcttcaatcgcgcgttagaaattgcttttttagtttctatattaataggagatagttgttgcggcatagtaaaaatgaaatgataactgtttaaaaatagctcttagtatgggaattacaatggatgaggaagtgatatttgaaactcctagagaattaatatctattaaacgaataaaagatattccaagatcaaaagacacgcatgtgtttgctgcgtgtataacaagtgacggatatccgttaataggagctagaagaacttcattcgcgttccaggcgatattatctcaacaaaattcagattctatctttagagtatccactaaactattacggtttatgtactacaatgaactaagagaaatctttagacggttgagaaaaggttctatcaacaatatcgatcctcactttgaagagttaatattattgggtggtaaactagataaaaaggaatctattaaagattgtttaagaagagaattaaaagaggaaagtgatgaacgtataacagtaaaagaatttggaaatgtaattctaaaacttacaacacgggataaattatttaataaagtatatataagttattgcatggcgtgttttattaatcaatcgttggaggatttatcgcatactagtatttacaatgtagaaattagaaagattaaatcattaaatgattgtattaacgacgataaatacgaatatctgtcttatatttataatatgctagttaatagtaaatgaacttttacagatctagtataattagtcagattattaagtataatagacgactagctaagtctattatttgcgaggatgactctcaaattattacactcacggcattcgttaaccaatgcctatggtgtcataaacgagtatccgtgtccgctattttattaactactgataacaaaatattagtatgtaacagacgagatagttttctctattctgaaataattagaactagaaacatgtttagaaagaaacgattatttctgaattattccaattatttgaacaaacaggaaagaagtatactatcgtcatttttttctctagatccagctactactgataatgatagaatagacgctatttatccgggtggcatacccaaaaggggtgagaatgttccagagtgtttatccagggaaattaaagaagaagttaatatagacaattcttttgtattcatagacactcggttttttattcatggcatcatagaagataccattattaataaattttttgaggtaatcttctttgtcggaagaatatctctaacgagtgatcaaatcattgatacatttaaaagtaatcatgaaatcaaggatctaatatttttagatccgaattcaggtaatggactccaatacgaaattgcaaaatatgctctagatactgcaaaacttaaatgttacggccatagaggatgttattatgaatcattaaaaaaattaactgaggatgattgattaaaaaatataaattaatttaccatcgtgtatttttataacgggattgtccggcatatcatgtagatagttaccgtctacatcgtatactcgaccatctacgcctttaaatcctctatttattgacattaatctattagaattggaataccaaatattagtaccctcaattagtttattggtaatattttttttagacgatagatcgatggctcttgaaaccaaggttttccaaccggactcattgtcgatcggtgagaagtctttttcattagcatgaatccattctaatgatgtatgtttaaacactctaaacaattggacaaattcttttgatttgctttgaatgatttcaaataggtcttcgtctacagtaggcataccattagataatctagccattataaagtgcacgtttacatatctacgttctggaggagtaagaacgtgactattgagacgaatggctcttcctactatctgacgaagagacgcctcgttccatgtcatatctaaaatgaagatatcattaattgagaaaaaactaataccctcgcctccactagaagagaatacgcatgttttaatgcattctccgttagtgtttgattcttggttaaactcagccaccgccttgattctagtatcttttgttctagatgagaactctatattagagataccaaagactttgaaatatagtaataagatttctattcctgactgattaacaaatggttcaaagactagacatttaccatgggatgctaatattcccaaacatacatctataaatttgacgcttttctcttttaattcagtaaatagagagatatcagccgcactagcatcccctttcaatagttctccctttttaaaggtatctaatgcggatttagaaaactctctatctcttaatgaatttttaaaatcattatatagtgttgctatctcttgcgcgtattcgcccggatcacgattttgtctttcaggaaagctatcgaacgtaaacgtagtagccatacgtctcagaattctaaatgatgatatacctgtttttatttcagcgagtttagccttttgataaatttcttcttgctttttcgacatattaacgtatcgcattaatactgttttcttagcgaatgatgcagacccttctacgtcatcaaaaatagaaaactcgttattaactatatacgaacatagtcctcctagtttggagactaattctttttcatcgactagacgtttattctcaaatagcgattggtgttgtaaggatcctggtcgtagtaagttaaccaacatggtgaattcttgcacactattgacgataggtgtagccgataaacaaatcatcttatggttttttaacgcaatggtcttagataaaaaattatatactgaacgagtaggacggatcttaccatcttctttgattaatgatttagaaatgaagttatgacattcatcaataatgacgcatattctactcttggaattaatagttttgatattagtaaaaaatttatttctaaaattttgatcatcgtaattaataaaaatacaatccttcgttatctctggagcgtatctgagtatagtgttcatccaaggatcttctatcaaagcctttttcaccaataagataatagcccaattcgtataaatatccttaagatgtttgagaatatatacagtagtcattgttttaccgacacccgtttcatggaacaataaaagagaatgcatactgtctaatcctaagaaaactcttgctacaaaatgttgataatccttgaggcgtactacgtccgaccccatcatttcaacgggcatattagtagttctgcgtaaggcataatcgatataggccgcgtgtgatttactcatttatgagtgataagtaataactatgttttaaaaatcacagcagtagtttaactagtcttctctgatgtttgttttcgatactttttgaatcagaagtcatactagaataaagcaacgagtgaacgtaatagagagcttcgtatactctattcgaaaactctaagaacttattaatgaattccgtatccactggattgtttaaaatactaaattgaacactgttcacatccttccaagaagaagacttagtgacggacttaacatgagacataaataaatccaaattttttttacaaacatcactagccaccataatggcgctatctttcaaccagctatcgcttacgcattttagcagtctaacatttttaaagagactacaatatattctcatagtatcgattacacctctaccgaataaagttggaagtttaataatacaatatttttcgtttacaaaatcaaataatggtcgaaacacgtcgaaggttaacatcttataatcgctaatgtatagattgttttcagtgagatgattattagatttaatagcatctcgttcacgtttgaacagtttattgcgtgcgctgaggtcggcaactacggcgtccgctttagtactcctcccataatactttacgctattaatctttaaaatttcatagactttatctagatcgctttctggtaacatgatatcatgtgtaaaaagttttaacatgtcggtcggcattctatttagatcattaactctagaaatctgaagaaagtaattagctccgtattccagactaggtaatgggcttttacctagagacagattaagttctggcaatgtttcataaaatggaagaaggacatgcgttccctcccggatattttttacaatttcatccatttacaactctatagtttgttttcattattattagttattatctcccataatcttggtaatacttaccccttgatcgtaagataccttatacaggtcattacatacaactaccaattgtttttgtacataatagattggatggttgacatccatggtggaataaactactcgaacagatagtttatctttccccctagatacattagccgtaatagttgtcggcctaaagaatatctttggtgtaaagttaaaagttagggttcttgttccattattgctttttgtcagtagttcattataaattctcgagatgggtccgttctctgaatatagaacatcatttccaaatctaacttctagtctagaaataatatcggtcttattcttaaaatctattcccttgatgaagggatcgttaatgaacaaatccttggcctttgattcggctgatctattatctccgttatagacgttacgttgactagtccaaagacttacaggaatagatgtatcgatgatgttgatactatgtgatatgtgagcaaagattgttctcttagtggcatcactatatgttccagtaatggcggaaaactttttagaaatgttatatataaaagaattttttcgtgttccaaacattagcagattagtatgaagataaacactcatattatcaggaacattatcaatttttacatacacatcagcatcttgaatagaaacgataccatcttctggaacctctacgatctcggcagactccggataaccagtcggtgggccatcgctaacaataactagatcatccaacaatctactcacatatgcatctatataatctttttcatcttgtgagtaccctggatacgaaataaatttattatccgtatttccataataaggtttagtataaacagagagagatgttgccgcatgaacttcagttacagtcgccgttggttggtttatttgacctattactctcctaggtttctctataaacgatggtttaatttgtacattcttaaccatatatccaataaagctcaattcaggaacataaacaaattctttgttgaacgtttcaaagtcgaacgaagagtcacgaataacgatatcggatactggattgaaggttaccgttacggtaatttttgaatcggatagtttaagactgctgaatgtatcttccacatcaaacggagttttaatataaacgtatactgtagatggttctttaatagtgtcattaggagttaggccaatagaaatatcattaagttcactagaatatccagagtgtttcaaagcaattgtattattgatacaattattatataattcttcgccctcaatttcccaaataacaccgttacacgaagagatagatacgtgattaatacatttatatccaacatatggtacgtaactgaatcttcccatacctttaacttctggaagttccaaactcagaaccaaatgattaagcgcagtaatatactgatccctaatttcgaagctagcgatagcctgattgtctggaccatcgtttgtcataactccggatagagaaatatattgcggcatatacaaagttggaatttgactatcgactgcgaagacattagaccgtttaatagagtcatccccaccgatcaaagaattaatgatagtattattcattttctatttaaaatggaaaaagcttacaataaactccgtagagaaatatctataatttgtgagttttccttaaagtaacagcttccgtaaacgccgtctttatctcttagtaggtttattgtatttatgaccttttccttatcttcatagaatactaaaggcaacaaagaaatttttggttcttctctaagagctacgtgagacttaaccatagaagccaacgaatccctacatattttagaacagaaataccctacttcaccacccttgtatgtctcaatactaataggtctaaaaaccaaatcttgattacaaaaccaacacttatcaattacactatttgtcttaatagacacatctgccatagatttataatactttggtagtatacaagcgagtgcttcttctttagcgggcttaaagactgctttaggtgctgaaataaccacatctggaaggcttactcgcttagccatttaattacggaactatttttttatacttctaatgagcaagtagaaaacctctcatctacaaaaacgtactcgtgtccataatcctctaccatagttacacgttttttagatctcatatgtgctaaaaagttttcccatactaattggttactattatttttcgtataatttttaacagtttgaggttttagatttttagttacagaagtgatatcgaatattttatccaaaaagaatgaataattaattgtcttagaaggagtgttttcttggcaaaagaataccaagtgcttaaatatttctactacttcattaatcttttctgtactcagattcagtttctcatcttttacttgattgattatttcaaagactaacttataatcctttttatttattctctcgttagccttaagaaaactagatacaaaatttgcatctacatcatccgtggatatttgatttttttccatgatatccaagagttccgagataatttctccagaacattgatgagacaataatctccgcaatacatttctcaaatgaataagtttattagacacgtggaagtttgactttttttgtacctttgtacatttttgaaataccgactcgcaaaaaatacaatattcatatccttgttcagatactataccgttatgtctacaaccgctacataatcgtagattcatgttaacactctacgtatctcgtcgtccaatattttatataaaaacattttatttctagacgttgccagaaaatcctgtaatatttttagttttttgggctgtgaataaagtatcgccctaatattgttaccgtcttccgccaatatagtagttaaattatccgcacatgcagaagaacaccgcttaggcggattcagtacaatgttatatttttcgtaccaactcatttaaatatcataatctaaaatagttctgtaatatgtctagcgctaatatattgatcataatcctgtgcataaattaagatacaacaatgtctcgaaatcatcgacatggcttcttccatagttagaagatcgtcgtcaaagttagcaacgtgattcatcaacatttgctgttttgaggcagcaaatactgaaccgtcgccattcaaccattcataaaaaccatcgtctgaatccattgataatttcttgtactggtttttgagagctcgcatcaatctagcatttctagctcccggattgaaaacagaaagaggatcgtacatccagggtccattttctgtaaatagaatcgtataatgtcccttcaagaagatatcagacgatccacaatcaaagaattggtctccgagtttgtaacaaactgcggactttaacctatacatgataccgtttagcataatttctggtgatacgtcaatcggagtatcatctattagagatctaaagccggtgtaacattctccaccaaacatattcttattctgacgtcgttctacataaaacatcattgctccattaacgataacaggggaatgaacagcactacccatcacattagttcccaatggatcaatgtgtgtaactccagaacatcttccatagcctatgttaggaggagcgaacaccactcttccactattgccatcgaatgccatagaataaatatccttggaattgatagaaatcggactgtcggatgttgtgatcatcttcataggattaacaactatgtatggtgccgcctgaagtttcatatcgtaactgatgccgtttataggtctagccacagaaaccaacgtaggtctaaatccaactatagacaaaatagaagccaatatctgttcctcatctgtcataacttgagagcatccagtatgaataatcttcattagatggggatctaccgcatcatcatcgttacaataaaaaattcccattctaatgttcataattgcttttctaatcatggtatgcatgtttgctctctgaatctctgtggaaattagatctgatacacctgtaatcactatcggattatcctccgtaagacgattaaccaacaacatataattataagactttacttttctaaattcataaagttgctggattaggctataggtgtctccatgtacatacgcgttctcgagcgcaggaagtttaataccgaatagtgccatcagaataggatgaatatagtaattagtttctggttttctataaataaaagacaaatcttgtgaactagacatatcggtaaaatgcatggattggaatcgtgtagtcgacagaagaatatgatgattagatggagagtatattttatctaactctttgagttggtcaccgattctaggactagctcgagaatgaataagtactaaaggatgagtacatttcacagaaacactagcattgttcaatgtgctctttacatgggtaaggagttgaaatagctcgtttctatttgttctgacaatatttagtttattcataatgttaagcatatcctgaatagtaaagttagatgtgtcatacttgttagtagttagatatttagcaattgcattcccatcatttctcaatctcgtactccaatcatgcgtggatgctacttcgtcgatggaaaccatacaatcctttttgataggctgttgagattgatcatttcctgcacgtttaggtttggtacgttgatttctagcccctgcggatataaagtcatcgtctacaatttgggacaatgaattgcatacactacaagacaaagatttatcagaagtgtgaatatgatcttcatctaccaaagaaagagtttgattagtataactagattttagtcctgcgttagatgttaaaaaaacatcgctattgaccacggcttccattatttatattcgtagtttttactcgaaagcgtgattttaatatccaatcttattacttttggaatcgttcaaaacctttgactagttgtagaatttgatctattgccctacgcgtatactcccttgcatcatatacgttcgtcaccagatcgtttgtttcggcctgaagttggtgcatatctctttcaacattcgacatgagatccttaagggccatatcgtctagattttgttgagatgctgctcctggatttggattttgttgtgctgttgtacatactgtaccaccagtaggtgtaggagtacatacagtggccacaataggaggttgagaaagtgtaaccgttggagtagtacaagaaatacttccatccgattgttgtgtacatgtagttgttggtaacgtctgagaaggttgggtagatggcggcgtcgtcgttttttgatctttattaaatttagagataatatcctgaacagcattgctcggcgtcaacgctggaaggagtgaactcgccggcgcatcagtatcttcagacagccaatcaaaaagattagacatatcagatgatgtattagtttgttgtcgtggttttggtgtaggagcagtactactaggtagaagaataggagccgatgtagctgttggaaccggctgtggagttatatgaatagttggttgtagcggttggataggctgtctgctggcggccatcatattatctctagctagttgttctcgcaactgtctttgataatacgactcttgagactttagtcctatttcaatcgcttcatcctttttcgtatccggatccttttcttcagaataatagattgacgactttggtgtagaggattctgccagcctctgtgagaacttgttaaagaagtccatttaaggctttaaaattgaattgcgattataagattaaatggcagacacagacgatattatcgactatgaatccgatgatctcaccgaatacgaggatgatgaagaagaggaagaagatggagagtcactagaaactagtgatatagatcccaaatcttcttataagattgtagaatcagcatccactcatatagaagatgcgcattccaatcttaaacatatagggaatcatatatctgctcttaaacgacgctatactagacgtataagtctatttgaaatagcgggtataatagcagaaagctataacttgcttcaacgaggaagattacctctagtttcagaattttctgacgaaacgatgaagcaaaatatgctacatgtaattatacaagagatagaggagggttcttgtcctatagtcatcgaaaagaacggagaattgttgtcggtaaacgattttgacaaagatggtctaaaattccatctagactatattatcaaaatttggaaacttcaaaaacgatattagaatttatacgaatatcgttctctaaatgtcacaatcaagtctcgcatgttcagcaatttattgtcgtactttatatcgtgttcattaacgatatcttgcaaaatagtaatgattctatcttccttcgatagatattcttcagagattattgtcttatattctttcttgttatcagatatgaatttgataagactttgaacattattgatacccgtctgtttaattttttctacagatattttagttttggcagattctatcgtatctgtcaatagacatccaacatcgacattcgacgtcaattgtctataaatcaacgtataaattttagaaataacattagcgaattgttgtgcgttgatgtcgttattctgaaacagtatgattttaggtagcattttcttaacaaagagaacgtatttattgttactcagttgaacagatgatatatccagattactaacgcatctgattccgtataccaaactttcagaagaaatggtatacaattgtttgtattcattcaatgtctctttttcagaaattagtttagagtcgaatactgcaataattttcaagagatagttttcatcagataagattttatttagtgtagatatgataaaactattgttttgttggagaacttgatacgccgcgttctctgtagtcgacgctctcaaatgggaaacaatctccattatttttttggaatcggatactatatcttcggtatcttgacgcagtctagtatacatagagttaagagagattagagtttgtacattaagcaacatgtctctaaatgtggctacaaacttttcctttttcacatcatctagtttattatataccgatttcacaacggcaccagatttaaggaaccagaatgaaaaactctgataactacaatatttcatcatagttacgattttatcatcttctatagttggtgtaatagcgcatacctttttctccaagactggaaccaacgtcataaaaatgtttaaatcaaaatccatatcaacatctgatgcgctaagaccagtctcgcgttcaagattatctttactaatggtgacgaactcatcgtataaaactctaagtttgtccattatttatttacagatttagttgtttaatttatttgtgctcttccagagttgggatagtatttttctaacgtcggtattatattattaggatctacgttcatatgtatcataatattaatcatccacgttttgataaatctatctttagcttctgaaataacgtatttaaacaaaggagaaaaatatttagctacggcatcagacgcaataacattttttgtaaatgtaacgtatttagacgacagatcttcgttaaaaagttttccatctatgtagaatccatcggttgttaacaccattcccgcgtcagattgaataggagtttgaatagtttgttttggaaatagatccttcaataacttatagttgggtgggaaaaaatcgattttatcactagactctttcttttttactatcattacctcatgaactatttcttgaatgagtatatgtattttctttcctatatcggacgcgttcattggaaaatataccatgtcgttaactataagaatatttttatcctcgtttacaaactgaataatatcagatgtagttcgtaaacgaactatatcatcaccagcacaacatctaactatatgatatccactagtttcctttagccgtttattatcttgttccatattagcagtcattccatcatttaagaaggcgtcaaaaataatagggagaaatgacattttggattctgttacaactttaccaaaattaaggatatacggacttactatctttttctcaacgtcaatttgatgaacacacgatgaaaatgtgcttctatgagattgatcatgtagaaaacaacaagggatacaatatttccgcatatcatgaaatatattaagaaatcccaccttattatatttccccaaaggatccatgcacgtaaacattatgccgttatcattaataaagacttctttctcatcggatctgtaaaagttgttactgatttttttcattccaggatctagataattaataatgatgggttttctattcttattctttgtattttggcatatcctagaccagtaaacagtttccactttggtaaaatcagcagacttttgaacgctattaaacatggcattaatggcaataactaaaaatgtaaaatatttttctatgttaggaatatggtttttcactttaatagatatatggtttttggccaaaatgatagatatttttttatccgaggatagtaaaatattattagtcgccgtctctataaaaatgaagctagtctcgatatccaattttattctagaattgataggagtcgccaaatgtaccttatacgttatatctcccttgatgcgttccatttgtgtatctatatcggacacaagatctgtaaatagttttacgttattaatcatcacggtatcgccgtcgctagataacgctaatgtaccatccaagtcccaaatggagagatttaactgttcatcgtttagaataaaatgattaccggtcatattaataaagtgttcatcgtatctagataacaacgacttataattaatgtccaagtcttgaactcgctgaatgatcttttttaacccagttagttttagattggtacgaaatatattgttaaactttgattctacagtaatgtccaaatctagttgtggaaatacttccatcaacattgtttcaaacttgataatattattatctacatcttcgtacgatccaaattccggaatagatgtatcgcacgctctggccacccagataaccaaaaagtcacacgctccaggatatacattgtataaaaagctatcgttttttagtagggtttttttctgcgtgtatacgaagggattaaaaatagtattatcaacgtaactatattccaaattattcttatgagaatagataataatatcgtccttaatatctaacaaatttcctaaatatccctttaattgagtcattcgaagcgtcaatagaatatgtctcttaactatttccggctgttgtatatttaaatgacttcgtaaaaaataatatatgggcgacttctcatctatgtaatcatatggagtgagatatagggctcgttctacctcctgccccttacccacctgtaataccaattgcggacttactatatatcgcatatttatatcgtggggtaaagtgaaaatctactaccgatgatgtaagtcttacaatgttcgaaccagtaccagatcttaatttggaggcctccgtagaactaggggaggtaaatatagatcaaacaacacctatgataaaggagaatagcggttttatatcccgcagtagacgtctattcgcccatagatctaaggatgatgagagaaaactagcactacgattctttttacaaagactttattttttagatcatagagagattcattatttgttcagatgcgttgacgctgtaaaagacgtcactattaccaaaaaaaataacattatcgtggcgccttatatagcacttttaactatcgcatcaaaaggatgcaaacttacagaaacaatgattgaagcattctttccagaactatataatgaacatagtaagaaatttaaattcaactctcaagtatccatcatccaagaaaaactcggataccagtttggaaactatcacgtttatgattttgaaccgtattactctacagtagctctggctattcgagatgaacattcatctggcatttttaatatccgtcaagagagttatctggtaagttcattatctgaaataacatatagattttatctaattaatctaaaatctgatcttgttcaatggagtgctagtacgggcgctgtaattaatcaaatggtaaatactgtattgattacagtgtatgaaaagttacaactggtcatagaaaatgattcacaatttacatgttcattggctgtggaatcaaaacttccaataaaattacttaaagatagaaatgaattatttacaaaattcattaacgagttaaaaaagaccagttcattcaagataagcaaacgcgataaggatacgctactaaaatattttacttaggactggagttagaatttatagacgactcatttcgtttatcattgttactattattactattactatcattattagtgttggcattattagtattcttcttgtcatcttgttcagaaatatacagcaatgctatacctaatactaaatacattatcatgctcgcaatggctctaacaacaacgaaccaaaatgaatttggtcgtagcttttgttcacaaaaatacataaagaaatgtctacataaatctatggcgccattggctacttgaaatagcgccagtcctcctacagattttaatatagctgtataacatgacatttattcatcatcaaaagagacagagtcaccatctgtcatatttagattttttttcatgtgttcaaagtatcctctactcatttcattataatagtttatcatacttagaattttaggacggatcaatgagtaagacttgactagatcgtcagtagtaatttgtgcatcgtctattctgcatccgcttcgtcgaataatgtatagcatcgctttgagattctccatagctatcaagtctttatacaatgacatggaaatatctgtgaatactttatacttctccaacatcgatgccttaacatcatcgcctactttagcattgaaaatacgttctattgtgtagatggatgtagcaagatttttaaacaacaatgccatcttacacgatgattgcctcaagtctccaatcgtttgtttagaacgattagctacagagtccaatgcttggctgactagcatattattatctttagaaattgtattcttcaatgaggcgtttatcatatctgtgatttcgttagtcatattacagtctgactgggttgtaatgttatccaacatatcacctatggatacggtacacgtaccagcatttgtaataatcctatctaagatgttgtatggcattgcgcagaaaatatcttctcctgtaatatctccactctcgataaatctactcagattattcttaaatgccttattctctggagaaaagatatcagtgtccatcatttcattaatagtatacgcagaaaagataccacgagtatcaattctatccaagatacttatcggttccgagtcacagataatggtttcctctccttcgggagatcctgcatagaaatatctaggacaatagtttctatactgtctgtaactctgataatctctaaagtcactaactgataccatgaaattgagaagatcaaacgctgaagtaattaatttttctgcctcgtttttactacaactagttttcatcaatgtagtgacgatgtattgtttagttacttttggtctaatactgatgatagagatattattgcttcccataatggatcttctagtagtcaccttaaagcccattgatgcgaatagcagatagataaagtcttggtatgactcctttctaatatagtacggactacctttgtcacccaactttatacccacataagccataacaacctctttaatagccgtttcatgaggtttatcagccatgagcctgagtagttggaagaatctcatgaatcccgtctcagaaagtcctatatgcatgatagatttatctttcctgggaaactctcgtatagtcatagatgaaatactctttaaagtttctgaaataagattagtaacagtcttacctccgactactctaggtaacaaacaaactctaataggtgttttctctgcggagataatatcagaaaggatagagcaataagtagtattattgtgattataaagaccgaatacataacaggtagaatttataaacatcatgtcctgaaggtttttagacttgtattcctcgtaatccataccgtcccaaaacatggatttggtaactttgatagccgtagatctttgttccttcgccaacaggttaaagaaattaataaagaatttgttgtttctatttatgtccacaaattgcacgtttggaagcgccacggttacattcactgcagcattttgaggatcgcgagtatgaagtacgatgttattgtttactggtatatctggaaagaaatctaccagtctaggaataagagattgatatcgcatagaaatagtaaagtttataatctcatcatcgaagagcattttgttaccattgtaataaatatccactctgtcatatgtataaatgaagtactgttcaaacatgatgagatgtttatatgttggcatagtagtgagatcgacgtttggtaatggcaatgtattaagattaactccataatgtctagcagcatctgcgatgttataagcgtcgtcaaagcggggtcgatcttgtattgttatatattgtctaacacctataagattatcaaaatcttgtctgcttaatacaccgttaacaatttttgccttgaattcttttattggtgcattaataacatccttatagaggatgttaaacaaataagtgttatcaaagttaagatctggatatttcttttctgctagaacatccattgagtcggagccatctggtttaatataaccaccgataaatctagctctgtattctgtatccgtcaatctaatattaagaaggtgttgagtgaaaggtggaagatcgtaaaagctgtgagtattaatgataggattagtttccgaactaatgttaattggggtattaataatatctatatttccagcgttaagtgtaacattaaacagttttaattcacgtgacgtggtatcaattaaataattaatgcccaatttggatatagcagcctgaagctcatcttgtttagttacggatcctaatgagttattaagcaatatatcgaacggatgaacgaaggttgttttaagttggtcacatactttgtaatctagacatagatgcggaagaacggtagaaactatacgaaataaatattcagagtcctctaattgatcaagagtaactattgacttaataggcatcatttatttagtattaaatgacgaccgtaccagtgacggatatacaaaacgatttaattacagagttttcagaagataattatccatctaacaaaaattatgaaataactcttcgtcaaatgtctattctaactcacgttaacaacgtggtagatagagaacataatgccgccgtagtgtcatctccagaggaaatatcctcacaacttaatgaagatctatttccagatgatgattcaccggccactattatcgaacgagtacaacctcatactactattattgacgatactccacctcctacgtttcgtagagagttattaatatcggaacaacgtcaacaacgagaaaaaagatttaatattacagtatcgaaaaatgctgaagcaataatggaatctagatctatgataacttctatgccaacacaaacaccatccttgggagtagtttatgataaagataaaagaattcagatgttagaggatgaagtggttaatcttagaaatcaacgatctaatacaaaatcatctgataatttagataattttaccaaaatactatttggtaagactccgtacaaatcaacagaagttaataagcgtatagccatcgttaattatgcaaatttgaacgggtcccccttatcagtcgaggacttggatgtttgttcggaggatgaaatagatagaatctataaaacgattaaacaatatcacgaaagtagaaaacgaaaaattatcgtcactaacgtgattattattgtcataaacattatcgagcaggcattgctaaaactcggatttgaagaaatcaaaggactgagtaccgatatcacttcagaaattatcgatgtggagatcggagatgactgcgatgctgtagcatctaaactaggaatcggtaacagtccggttcttaatattgtattgtttatactcaagatattcgttaaacgaattaaaattatttaatttaatacattcccatatccagacaacaatcgtctggattaatctgttcctgtcgtctcataccggacgacatattaatctttttattagtgggcatctttttagatggtttctttttcccagcattaactgagtcgatacctagaagatcgtgattgatctctccgaccattccacgaacttctaattggccgtctctgacggtaccataaactattttaccagcattagtaacagcttggacaatctgaccatccatcgcattgtacgatgtagtagtaactgttgttctacgtctaggagcaccagaagtatttttggagcccttggatgttgatgtagaagaagacgaggattttgattttggtttacatgtaatacattttgaactctttgattttgtatcacatgcgccggcagtcacatctgtttgagaattaagattattgttgcctcctttgacggctgcatctccaccgatttgcgctagtagatttttaagctgtggtgtaatcttattaactgtttcgatataatcatcgtaactgcttctaacggctaaattttttttatccgccatttagaagctaaaaatatttttatttatgcagaagatttaactagattatacaatgaactaatatgatccttttccagattatttacaaacttggtattttttggttctggaggaggcgaatttaaattcggacttggattcggattttgtaagttcttgatcttattatacatcgagtataggatggcgacagtaactgctacacaaataccgatcaaaagaagaataccaatcatttattgacaataacttcactattgatcaagtatgcaatatatcatcttttcactaaataagtagtaataatgattcaacaatgtcgagatatatggacgataataatttagttcatggaaatatcgctatgattggtgtgaatgactccgctaactctgtggggtgcgcagtgctttccccacatagaataaattagcattccgactgtgataataataccaagtataaacgccataatactcaatactttccatgtacgagtgggactggtagacttactaaagtcaataaaggcgaagatacacgaaagaatcaaaagaatgattccagcgattagcacgccggaaaaataatttccaatcataagcatcatgtccatttaactaataaaaattttaaatcgccgaatgaacaaagtggaatataaaccatataaaaacaatagtttgtactgcaaaaataatatctatttttgttttcgaagatatggtaaaattaaatagtagtacacagcatgttataactaacagcagcaacggctcgtaattacttatcatttactagacgaaaaggtggtgggatattttcttgctcaaataatacgaatatatcacccatccattttatgcgatgtttatatactctaatctttaatagatctatagacgacgggtttaccaacaatatagattttatcgattcatctaatttaaacccttccttaaacgtgaatgatctattatctggcataacgatgaccctacctgatgaatcggacaatgtactgggccatgtagaataaattatcaacgaattatcgtctacgaacatttatatcatttgttttaattttaggacgcgaataaatggatataaaatagaaaataacagatattacaaccagtgttatggccgcgcccaaccaggtaggcagttttattttatcttttactacaggttctcctggatgtacgtcaccaacggcggacgtagttctagtacaattagacgtaagttccgcttgggaattttttaacgctaaagagttaacgttaatcgtgcacccaacgtatttacatctagttcgttgaacatcttgattataatataaccattttctatctctagattcgtcagtgcactcatgtaaccaacataccctaggtcctaaatatttatctccggaattagattttggataattcgcgcaccaacaatttctatttcctttatgatcgttacaaaagacgtataatgccgtatccccaaaagtaaaataatcaggacgaataattctaataaactcagaacaatatctcgcatccatatgtttggagcaaatatcggaataagtagacatagccggtttccgttttgcacgtaaccattctaaacaattggggtttccaggatcgtttctacaaaatccagtcatgaaatcgtcacaatgttctgtcttgtaattattattaaatatttttggacagtgtttggtatttgtcttagaacaacattttgccacgctatcactatcgcccaggagataatccttttttataaaatgacatcgttgcccggatgctatataatcagtagcgtgttttaaatccttaatatattcaggagttacctcgttctgataatagattaatgatccaggacgaaatttgaaagaactacatggttctccatgaattaatacatattgtttagcaaattcaggaactataaaactactacaatgatctatcgacataccatctatcaaacaaaacttgggtttaatttctcccggagatgtttcataatagtacgtataactttcttctgcaaacttaacagctctattatattcaggataattaaaacctaattccatatatttgtctcgtatatctgctattcctggtgctattttgattctattaagagtaacagctgcccccattcttaataatcgtcagtatttaaactgttaaatgttggtatatcaacatctaccttatttcccgcagtataaggtttgttgcaggtatactgttcaggaatggttacatttatacttcttctatagtcctgtctttcgatgttcatcacatatgcaaagaacagaataaacaaaataatgtaagaaataatattaaatatctgtgaattcgtaaatacattgattgccataataattacagcagctacaatacacacaatagacattcccacagtgttgccattacctccacgatacatttgagttactaagcaataggtaataactaagctagtaagaggcaatagaaaagatgagataaatatcatcaatatagagattagaggagggctatatagagccaagacgaacaaaatcaaaccgagtaacgttctaacatcattatttttgaagattcccaaataatcattcattcctccataatcgttttgcatcatacctccatctttaggcataaacgattgctgctgttcctctgtaaataaatctttatcaagcactccagcacccgcagagaagtcgtcaagcatattgtaatatcttaaataactcatttatatattaaaaaatgtcactattaaagatggagtataatctttatgccgaactaaaaaaaatgacttgtggtcaacccctaagtctttttaacgaagacggggatttcgtagaagttgaaccgggatcatcctttaagtttctgatacctaagggattttacgcctctccttccgtaaagacgagtctagtattcgagacattaacaacgaccgataataaaatcactagtatcaatccaacaaatgcgccaaagttatatcctcttcaacgcaaagtcgtatctgaagtagtttctaatatgaggaaaatgatcgaatcaaaacgtcctctatacatcactcttcacttggcgtgtggatttggtaagactattaccacgtgttatcttatggctacacacggtagaaaaaccgtcatttgcgtacccaataaaatgttaatacatcaatggaagacacaggtagaggcagtcggattggaacataagatatccatagatggagtaagtagtctattaaaggaactaaagactcaaagtccggatgtattaatagtagtcagtagacatctgacaaacgatgccttttgtaaatatatcaataagcattatgatttgttcatcttggatgaatcacatacgtataatctgatgaacaatacagcagttacaagatttttagcgtattatcctccgatgatgtgttattttttaactgctacacctagaccatctaaccgaatttattgtaacagtattattaatattgccaagttatccaatctaaaaaaaactatctatgcagtagatagtttttttgagccatattccacagataatattagacatatggtaaaacgactagatggaccatctaataaatatcatatatataccgagaagttattatctgtagacgagcctagaaatcaacttattcttgataccctggtagaagaattcaagtcaggaactattaatcgcattttagttattactaaactacgtgaacatatggtattattctacaaacgattattagattttttcggaccagaggttgtatttataggagacgcccaaaatagacgtactccagatatggtcaaatcaatcaaggaactaaatagatttatattcgtatccaccttattttattccggtactggtttagatattcctagtttggattcgttgttcatttgctcggcagtaatcaacaatatgcaaatagagcaattactagggagggtatgtcgagaaacagaactattagataggacggtatatgtatttcctaacacatccatcaaagaaataaagtacatgataggaaatttcatgcaacgaattattagtctgtctgtagataaactaggatttaaacaaaaaagttatcggaaacatcaagaatccgatcccacttctgcatgtacaacatcatccagagaagaacgtgtattaaatagaatatttaactcgcaaaatcgttaagaagtttaagcgacgatccgcatgctgcgcaggccagtgtattacccctcatagtattaatataatccaatgatacttttgtgatgtcggaaatcttaaccaatttagactgacaggcagaacacgtcatgcaatcatcatcgtcatcgataactgtagtcttgggcttctttttgcgactcttcattccggaacgcacattggtgctatccatttaggtagtaaaaaataagtcagaatatgccctataacacgatcgtgcaaaacctggtatatcgtctctatctttatcacaatatagtgtatcgacatttttattattattgacctcgtttatcttggaacatggaatgggaacatttttgttatcaacggccatctttgccttaattccagatgttgtaaaattataactaaacagtctatcatcgacacaaatgaaattcttgtttagacgtttgtagtttacgtatgcggctcgttcgcgtctcattttttcagatattgcaggtactataatattaaaaataagaatgaaataacataggattaaaaataaagttatcatgacttctagcgctgatttaactaacttaaaagaattacttagtctgtacaaaagtttgagattttcagattctgcggctatagaaaagtataattctttggtagaatggggaacatctacttactggaaaataggcgtgcaaaaggtagctaatgtcgagacgtcaatatctgattattatgatgaggtaaaaaataaaccgtttaatattgatccgggctattacattttcttaccggtatattttgggagcgtctttatttattcgaagggtaaaaatatggtagaacttggatctggaaactcttttcaaataccagatgatatgcgaagtgcgtgtaacaaagtattagacagcgataacggaatagactttctgagatttgttttgttaaacaatagatggataatggaagatgctatatcaaaatatcagtctccagttaatatatttaaactagctagtgagtacggattaaacatacccaaatatttagaaattgaaatagaggaagacacattatttgacgacgagttatactctattatagaacgctctttcgatgataaatttccaaaaatatccatatcgtatattaagttgggagaacttagacggcaagttgtagactttttcaaattctcattcatgtatattgagtccatcaaggtagatcgtataggagataatatttttattcctagcgttataacaaaatcaggaaaaaagatattagtaaaagatgtagaccatttaatacgatccaaggttagagaacatacatttgtaaaagtaaaaaagaaaaacacattttccattttatacgactatgatggaaacggaacagaaactagaggagaagtaataaaacgaattatagacactataggacgagactattatgttaacggaaagtatttctctaaggttggtagtgcaggcttaaagcaattgactaataaattagatattaatgagtgcgcaactgtcgatgagttagttgatgagattaataaatccggaactgtaaaacgaaaaataaaaaaccaatcagcatttgatttaagcagagaatgtttgggatatccagaagcggattttataacgttagttaataacatgcggttcaaaatagaaaattgtaaggttgtaaatttcaatattgaaaatactaattgtttaaataacccgagtattgaaactatatatggaaactttaaccagttcgtctcaatctttaatgtcgtcaccgatgtcaaaaaaagattattcgagtgaaataatatgcgcctttgatataggtgcaaaaaatcctgccagaactgttttagaagtcaaggataactccgttagggtattggatatatcaaaattagactggagttctgattgggaaaggcgcatagctaaagatttgtcacaatatgaatacactacagttcttctagaacgtcagcctagaaggtcgccgtatgttaaatttatctattttattaaaggctttttatatcatacatcggctgccaaagttatttgcgtctcgcctgtcatgtctggtaattcatatagagatcgaaaaaagagatcggtcgaagcatttcttgattggatggacacattcggattgcgagactccgttccggatagacgcaaattagacgatgtagcggatagtttcaatttggctatgagatacgtattagataaatggaatactaattatacaccttataataggtgtaaatctagaaattacataaaaaaaatgtaataacgttagtaacgccattatggataatctatttacctttctacatgaaatagaagatagatatgccagaactatttttaactttcatctaataagttgcgatgaaataggagatatatatggtcttatgaaagaacgcatttcctcagaggatatgtttgataatatagtgtataataaagatatacatcctgccattaagaaactagtgtattgcgacatccaacttactaaacacattattaatcagaatacgtatccggtatttaacgattcttcacaagtgaaatgttgtcattatttcgacataaactcagataatagcaatattagctctcgtacagtagagatatttgagagggaaaagtcatctcttgtatcatatattaaaactaccaataagaagagaaaggtcaattacggcgaaataaagaaaactgttcatggaggcactaatgcaaattacttttccggtaaaaagtctgacgagtatctgagtactacagttagatccaacattaatcaaccttggatcaaaaccatctctaagaggatgagagttgatatcattaatcactctatagtaacgcgtggaaaaagctctatattacaaactatagaaattatttttactaatagaacatgtgtgaaaatattcaaggattctactatgcacattattctatccaaggacaaggatgaaaaggggtgtatacacatgattgacaaattattctatgtctattataatttatttctgttgttcgaagatatcatccaaaacgagtactttaaagaagtagctaatgttgtaaaccacgtactcacggctacggcattagatgagaaattattcctaattaagaaaatggctgaacacgatgtttatggagttagcaatttcaaaatagggatgtttaacctgacatttattaagtcgttggatcataccgttttcccctctctgttagatgaggatagcaaaataaagttttttaaggggaaaaagctcaatattgtagcattacgatctctggaggattgtataaattacgtgactaaatccgagaatatgatagaaatgatgaaggaaagatcgactattttaaatagcatagatatagaaacggaatcggtagatcgtctaaaagaattgcttctaaaatgaaaaaaaacactaattcagaaatggatcaacgactagggtataagtttttggtgcctgatcctaaagccggagttttttatagaccgttacatttccaatatgtatcgtattctaattttatattgcatcgattgcatgaaatcttgaccgtcaagcggccactcttatcgtttaagaataatacagaacgaattatgatagaaattagcaatgttaaagtgactcctccagattactcacctataatcgcgagtattaaaggtaagagttatgacgcattagccacgttcactgtaaatatctttaaagaggtaatgaccaaagagggtatatccatcactaaaataagtagttatgagggaaaagattctcatttgataaaaattccgctactaataggatacgggaataaaaatccacttgatacagccaagtatcttgttcctaatgtcataggtggagtctttatcaataaacaatctgtcgaaaaagtaggaattaatctagtagaaaagattacaacatggccaaaatttagggttgttaagccaaactcattcactttctcgttttcctccgtatcccctcctaatgtattaccgacaagatatcgccattacaagatatctctggatatatcacaattggaagcgttgaatatatcatcgacaaagacatttataacggtcaatattgttttgctgtctcaatatttatctagagtgagtctagaattcattagacgtagtttatcatacgatatgcctccagaagttgtctatctagtaaacgcgataatagatagtgctaaacgaattactgaatctattactgactttaatattgatacatacattaatgacctggtggaagctgaacacattaaacaaaaatctcagttaacgatcaacgagttcaaatatgaaatgctgcataactttttacctcatatgaactatacacccgatcaactaaagggattttatatgatatctttactaagaaagtttctctactgtatcttccacacttctagatatccagatagagattcgatggtttgtcatcgcatcctaacgtacggcaaatattttgagacgttggcacatgatgaattagagaattacataggcaacatccgaaacgatatcatgaacaatcacaagaacagaggcacttacgcggtaaacattcatgtactaacaactcccggacttaatcacgcgttttctagcttattgagtggaaagttcaaaaagtcagacggtagttatcgaacacatcctcactattcatggatgcagaatatttctattcctaggagtgttggattttatccggatcaagtaaagatttcaaagatgttttctgtcagaaaataccatccaagtcaatatctttacttttgttcatcagacgttccggaaagaggtcctcaggtaggtttagtatctcaattgtctgtcttgagttccattacaaatatactaacgtctgagtatttggatttggaaaagaaaatttgtgagtatatcagatcatattataaagatgatataagttactttgaaacaggatttccaatcactatagaaaatgctctagtcgcatctcttaatccaaatatgatatgtgattttgtaactgactttagacgtagaaaacggatgggattcttcggtaacttggaggtaggtattactttagttagggatcacatgaatgaaattcgcattaatattggagcgggaagattagtcagaccattcttggttgtggataacggagagctcatgatggatgtgtgtccggagttagaaagcagattagacgacatgacattctctgacattcagaaagagtttccgcatgtcatcgaaatggtagatatagaacaatttacttttagtaacgtatgtgaatcggttcaaaaatttagaatgatgtcaaaggatgaaagaaagcaatacgatttatgtgactttcctgccgaatttagagatggatatgtagcatcttcattagtgggaatcaatcacaattctggacccagagctattcttggatgtgctcaagctaaacaagctatctcttgtctgagctcggatatacgaaataaaatagacaatggaattcatttgatgtatccagagaggccaatcgtgattagtaaggctttagaaacttcaaagattgcggctaattgcttcggccaacatgttactatagcattaatgtcgtacaaaggtatcaatcaagaggatggaattatcatcaaaaaacaatttattcagagaggcggtctcgatattgttacagccaagaaacatcaagtagaaattccattggaaaactttaataacaaagaaagagataggtctaacgcctattcaaaattagaaagtaatggattagttagactgaatgctttcttggaatccggagacgctatggcacgaaatatctcatcaagaactcttgaagatgattttgctagagataatcagattagcttcgatgtttccgagaaatataccgatatgtacaaatctcgcgttgaacgagtacaagtagaacttactgacaaagttaaggtacgagtattaaccatgaaagaaagaagacccattctaggagacaaatttaccactagaacgagtcaaaagggaacagtcgcgtatgtcgcggatgaaacggaacttccatacgacgaaaatggtatcacaccagatgtcattattaattctacatccatcttctctagaaaaactatatctatgttgatagaagttattttaacagccgcatattctgctaagccgtacaacaataagggagaaaaccgacctgtctgttttcctagtagtaacgaaacatccatcgatacatatatgcaattcgctaaacaatgttatgagcattcaaatccgaaattgtccgatgaagaattatcggataaaatcttttgtgaaaagattctctatgatcctgaaacggataagccttatgcatccaaagtattttttggaccaatttattacttgcgtctgaggcatttaactcaggacaaggcaaccgttagatgtagaggtaaaaagacgaagctcattagacaggcgaatgagggacgaaaacgtggaggaggtatcaagttcggagaaatggagagagactgtttaatagcgcatggtgcagccaatactattacagaagttttgaaagattcggaagaagattatcaagatgtgtatgtttgtgaaaattgtggagacatagcagcacaaatcaagggtattaatacatgtcttagatgttcaaaacttaatctctctcctctcttaacaaaaattgataccacgcacgtatctaaagtatttcttactcaaatgaacgccagaggcgtaaaagtcaaattagatttcgaacgaaggcctccttcgttttataaaccattagataaagttgatctcaagccgtcttttctggtgtaatattctagtttggtagtagatacatatcaatatcatcaaattcgagatccgaattataaaatgggcgtggattgttaactatagaatcggacgtctgatattcgaaaatctgtggagtttcaggttttggtggaggtgtaactgctacttgggatactgaagtctgatattcagaaagctgtggatgttctggttcggcatccaccgatggtgtcacatcactaatcggttcggtaacgtctgtggatggaggtgctacttctacagaacctgtagcctcagttgtcaacggagatacatttttaatgcgagaaaatgtataatttggtaatggtttcttatgtggatctgaagaagaggtaagatatctactagaaagataccgatcacgttctagttctcttttgtagaacttaactttttctttctccgcatctagttgatattccaacctcttcacgttactacgttcagattccaattcacgttcgcatgggttacctccgcagtttttacgagcgatttcacgttcagccttcatgcgtctctccctctctctatcgagtttatcagagcagtctttctgaaggcgatcgaactccataaatttctccaacgctttgattgtttccatagatttccgaagttcagcttttaggactgtgattctttttctttcgaattcacagctggatgtacaaccgtttccattaccgccatctctaagtttcttttctagatcggcaacatttcatccccatgccttttacattcctcgagtctactgtcgtcgaaatatcgttccagctccttttcgacatcaataactttagcacgttgtctctcaagctctcttttgtagttatctgattccctggcacgtttaagatcttcatgcaattgagtcagctcttaacttcctctcttgcttcttcgtcatagtacgcgcaatcactgtgagatccattgttaccacgtctacactcggcgagctcgcgtttaagagattcaatttcccgtttgtattggtccatgtttccattgctaccaccattagatttacaggctgctagttgtcgttcgagatcagaaatacgggttttcttggaattgatttcgtcgatgtacttggcatcgaaacacttattaagttctttttccaattctacgattttatttctttcgcgagtcaattccctcctgtagtaactatctgttttgtcagattcacgctctctacgtagactttcttgcaagttactaatttgttccctagcacgtccgagtttagttttatatgctgaatagagttctgattcatcctttgagcagatctctagcgatcgtttaagattcctaattctagtctttagcctatttacctcctcagaagatgttccgttaccgttgcgtttacactcgttaagctgtctatcaagatccatgattctatctctaagacgttgcatctctctttccatatcagcattgctttcattattacgtctgcagtcactcaactgtctttcaatatctgagattctatctctaagacgtcgcatctctctctgtttcggcattggtttcattattacgtttacagtcgttcaactgtctttcaagatctgatattctagattggagtctgctaatctctgtagcattttcacggcattcactcagttgtctttcaagatctgaaattttagattggagtctgctaatctctgtaagatttcctcctccgctctcgatgcagtcggtcaacttattctctagttctctaatacgcgaacgcagtgcatcaacttcttgcgtgtcttcctggttgcgtgtacattcatcgagatctctaacgcgtcgtcgttcttcctcaagttctctgcgtactacagaaagcgtgtccctatcttgttgatatttagcaatttctgattctagagtactgattttgcttacgtagttactaatagttgtcttggccttatcaagatcctccttgtatttgtcgcattccttgatatccctacgaagtctggacagttcccattcgacattacgacgtttatcgatttcagctcggagatcgtcatcgcgttgttttagccacatacgactgagttcaagttctcgttgacaagatccatctacttttccattcctaatagtatccagttccttttctagttctgaacgcatttctcgttccctatcaagcgattctctcaattctcggatagtcttcttatcaatttctaataaatctgaaccatcatctgtcccattttgaatatccctgtgttctttgatctcttttgtaagtcggtcgattctttcggttttataaacagaatccctttccaaagtcctaatcttactgagtttatcactaagttctgcattcaattcggtgagttttctcttggcttcttccaactctgttttaaactctccactatttccgcattcttcctcgcatttatctaaccattcaattagtttattaataactagttggtaatcagcgattcctatagccgttcttgtaattgtgggaacataattaggatcttctaatggattgtatggcttgatagcatcatctttatcattattagggggatggacaaccttaattggttggtcctcatctcctccagtagcgtgtggttcttcaataccagtgttagtaataggcttaggcaaatgcttgtcgtacgcgggcacttcctcatccatcaagtatttataatcgggttctacttcagaatattcttttctaagagacgcgacttcgggagttagtagaagaactctgtttctgtatctatcaacgctggaatcaatactcaagttaaggatagcgaatacctcatcgtcatcatccgtatcttctgaaacaccatcatatgacatttcatgaagtctaacgtattgataaatagaatcagatttagtattaaacagatccttaacctttttagtaaacgcatatgtatattttagatctccagatttcataatatgatcacatgccttaaatgtcagtgcttccatgatataatctggaacactaatgggtgacgaaaaagatacagcaccatatgctacgttgataaataaatctgaaccactaagtagataatgattaatgttaagaaagaggaaatattcagtgtataggtatgtcttggcgtcatatcttgtactaaacacgctaaacagtttgttaatgtgatcaatttccaatagattaattagagcagcgggaataccaacaaacatattaccacatccgtattttctatgaatatcacatatcatgttaaaaaatcttgatagaagagcgaatatctcgtctgacttaatgagtcgtagttcagcagcaacataagtcataactgtaaatagaacatactttcctgtagtgttgattctagactccacatcaacaccattattaaaaatagttttatatacatctttaatctgctctccgttaatcgtcgaacgttctagtatacggaaacactttgatttcttatctgtagttaatgacttagtgatatcacgaagaatattacgaattacatttcttgtttttcttgagagacctgattcagaactcaactcatcgttccatagtttttctacctcagtggcgaaatctttggagtgcttggtacatttttcaataaggttcgtgacctccatttattataaaaaatttattcaaaacttaactacaatcgggtaattataagatcgtagatctcccatgtggcggaatactaccatctatcgcatgtggatggacagtaggtaatggccatgggaacagtaatgtttgcatatttatctttcttgctagtattactgcatattgtcccaatgtttcgatgtgatgttctaacctatcaactgccgctgtatcacaacaatagtgtccgatgaaattaagattatgatccaatgtgtttaatatatgattatcaagtcttatacgatccgcgtcttttttgacaggatcaggttcttctacaggaagaagtttcggcctcttatgatattcatgtctgggaaacggtggtctagggtgaggctccggtatcggagtgggttttggattataatcatcatcgtctatgacatcatcttcgacttcgatatttattttgctatcttgatgatgtcctgtatcagttgcattttcagcactcgactgaatattagcgcattcattgtctattattaccatatttctaaacccaaaatgtatgtgttgaacatcagtactatcgttgatgagtcttatagcatgaattcgcttatcgttatcgggtttatcttctgtcaccttagcaattccttttttattaaactctacataatcatatccatttctattgtttgttctaatataaacgagtatagcatcattgctaaatttttcaatagtatcaaaaacagaatatcctaaaccatataatatatattcaggaacactcaaactaaatgtccaggattctcctaaatacgtaaactttaatagtgcgaaatcattcaaaaatctaccacttatagatagatagtacataaatgcgtatagtagtctacctatctctttattatgaaaaccggcattacgatcatatatgtcgtgatatacctgtgatccgtttacgttaaaccataaatacatgggtgatcctataaacatgaatttatttctaattctcagagctatagttaattgaccgtgtaatatttgcttacatgcatacttgatacgcttattaataagatttttatcattgctcgttatttcagaatcgtatatataaggagtaccatcgtgattcttaccagatattatacaaaatactatatataaaatatattgacccacgttagtaatcatataaatgtttaacgttttaaattttgtattcaatgatccattatcatacgctatcatggtcttgtaatattcattctttaaaatataatattgtgttagccattgcattggagctcctaatggagattttctattctcatccattttaggataggctttcataaagtccctaataacttcgtgaataatgtttctatgttttctactgatgcatgtatttgcttcgatttttttatcccatgtttcatctatcatagatttaaacgcagtaatgctcgcaacattaacatcttgaaccgttggtacaattccgttccataaatttataatgttcgccatttatataactcattttttgaatatacttttaattaacaaaagagttaagttactcatatggacgccgtccagtctgaacatcaatctttttagccagagatatcatagccgctcttagagtttcagcgtgattttccaacctaaatagaacttcatcgttgcgtttacaacacttttctatttgttcaaactttgttgttacattagtaatctttttttccaaattagttagccgttgtttgagagtttcctcattgtcgtcttcatcggctttaacaattgcttcgcgtttagcctctggctttttagcagcctttgtagaaaaaaattcagttgctggaattgcaagatcgtcatctccggggaaaagagttccgtccatttaaagtacagattttagaaactgacactctgcgttatttatatttggtacaacacatggattataaatattgatgttaataacatcagaaaatgtaaagtctatacattgttgcatcgtgttaaattttctaatggatctagtattattgggtccaacttctgcctgaaatccaaatatggaagcggatacaaaaccgtttcctggataaaccacacatctccacttttgctttacatcagaaattgtgtcgttgacatcttgaactctcctatctaatgccggtgttccacctatagattttgaatattcgaatgctgcatgagtagcattaaattccttaatattgccataattttcatatattgagtaaccctggataaaaagtaaacacaccgcagccgtcgctaccacaataaaaaaaattgatagagagttcatttataatctattagaagctgacaaaatttttttacacgcatcagacaatgctttaataaatagttcaacatctacttttgtcatatcgaaccgatggtatgattctaacctagaattacatccgaaaaagttgactatgttcatagtcattaagtcattaacaaacaacattccagactctggattataagacgatactgtttcgtcacaattacctaccttaatcatgtgattatgaatattggctattagagcaccttctaagaaatctataatatctttgaaacacgatttaaaatcaaaccacgaatatacttctacgaagaaagttagtttacccataggagaaataactataaatggagatctaaatacaaaatccggatctatgatagttttaacattattatattctctattaaatacctccacatctaaaaatgttaattttgaaactatgtcttcgtttattaccgtacctgaactaaacgctataagctctattgtttgagaactctttaaacgatattcttgaaatacatgtaacaaagtttcctttaactcggtcggtttatctaccatagttacagaatttgtatccttatctataatataataatcaaaatcgtataaagttatataattatcgcgttcagattgtgatcttttcaaatagactaaaaaccccatttctctagtaagtatcttatgtatatgtttgtaaaatatcttcatggtgggaatatgctctaccgcagttagccattcctcattgacagcggtagatgtattagacaaaactattccaatgtttaacaagggccattttacgagattattaaatccttgtttgataaatgtagccaatgagggttcgagttcaacgacgattgaattctcttcccgcggatgctgcatgatgaacgacgggatgttgttcgattgatttggaattctttttcgactttttgtttatattaaatattttaaaatttatagcggatagcaattcatgtaccacggataatgtagacgcgtattgcgcatcgatatctttattattagataaatttatcaataaatgtgagaagtttgcctcgttaaggtcttccatttaaatattatataaacatttgtgtttgtatcttattcgtcttttatggaatagttttttactagtaaagctgcaattacacactttgtccgtaaaacataaatataaacaccagcttttatcaatcgttccaaaaagtcgacggcggacatttttaacatggcatctattttaaatacacttaggtttttggaaaaaacatcattttataattgtaacgattcaataactaaagaaaagattaagattaaacataagggaatgtcatttgtattttataagccaaagcattctaccgttgttaaatacttgtctggaggaggtatatatcatgatgatttggttgtattggggaaggtaacaattaataatctaaagatgatgctattttacatggatttatcatatcatggagtgacaagtagtggagcaatttacaaattgggatcgtctatcgatagactttctctaaataggactattgttacaaaagttaataattatgatgatacattttttgacgacgatgattgatcgctattgcacaattttgtttttgtactttctaatatagtgtttaggttctttttcatatgagaatattgatttactaaaatatctatgtttaacttttgttctatgacgtccttatcggcggtatcggtacatatacgtaattcaccttcacaaaatacggagtcttcgataataatagccaatcgattattggatctagctgtctgtatcatattcaacatgtttaatatatcctttcgtttcccctttacaggcatcgatcgtagcatattttccgcgtctgatatggaaatgttaaaactacaaaaatgcgtaatgttagcccgtcctaatattggtacgtgtctataagtttggcatagtagaataatagacgtgtttaaatgccttccaaagtttaagaattctattagagtattgcattttgatagtttatcgcctacatcatcaaaaataagtaaaaagtgtgctgattttttatgattttgtgcgacagcaatacatttttctatgttacttttagttcgtatcagattatattctagagattcctgactactaacgaaattaatatgatttggccaaatgtatccatcataatctgggttataaacgggtgtaaacaagaatatatgtttatattttttaactagtgtagaaaacagagatagtaaatagatagtttttccagatccagatcctcctgttaaaaccattctaaacggcatttttaataaattttctcttgaaaattgtttttcttggaaacaattcataattatatttacagttactaaattaatttgataataaatcaaaatatggaaaactaaggttgttagtagggaggagaacaaagaaggcacatcgtgatataaataacatttattatcatgatgacaccagaaaacgacgaagagcagacatctgtgttctccgctactgtttacggagacaaaattcagggaaagaataaacgcaaacgcgtgattggtctatgtattagaatatctatggttatttcactactatctatgattaccatgtccgcgtttctcatagtgcgcctaaatcaatgcatgtctgctaacgaggctgctattactgacgccgctgttgccgttgctgctgcatcatctactcatagaaaggttgcgtctagcactacacaatatgatcacaaagaaagctgtaatggtttatattaccagggttcttgttatatattacattcagactaccagttattctcggatgctaaagcaaattgcactgcggaatcatcaacactacccaataaatccgatgtcttgactacctggctcattgattatgttgaggatacatggggatctgatggtaatccaattacaaaaactacatccgattatcaagattctgatgtatcacaagaagttagaaagtatttttgtgttaaaacaatgaactaatatttatttttgtacattaataaatgaaatcgcttaatagacaaactgtaagtaggtttaagaagttgtcggtgccggccgctataatgatgatactctcaaccattattagtggcataggaacatttctgcattacaaagaagaactgatgcctagtgcttgcgccaatggatggatacaatacgataaacattgttatttagatactaacattaaaatgtctacagataatgcggtttatcagtgtcgtaaattacgagctagattgcctagacctgatactagacatctgagagtattgtttagtattttttataaagattattgggtaagtttaaaaaagaccaatgataaatggttagatattaataatgataaagatatagatattagtaaattaacaaattttaaacaactaaacagtacgacggatgctgaagcgtgttatatatacaagtctggaaaactggttaaaacagtatgtaaaagtactcaatctgtactatgtgttaaaaaattctacaagtgacaacaaaaaatgaattaataataagtcgttaacgtacgccgccatggacgccgcgtttgttattactccaatgggtgtgttgactataacagatacattgtatgatgatctcgatatctcaatcatggactttataggaccatacattataggtaacataaaaactgtccaaatagatgtacgggatataaaatattccgacatgcaaaaatgctactttagctataagggtaaaatagttcctcaggattctaatgatttggctagattcaacatttatagcatttgtgccgcatacagatcaaaaaataccatcatcatagcatgcgactatgatatcatgttagatatagaagataaacatcagccattttatctattcccatctattgatgtttttaacgctacaatcatagaagcgtataacctgtatacagctggagattatcatctaatcatcaatccttcagataatctgaaaatgaaattgtcgtttaattcttcattctgcatatcagacggcaatggatggatcataattgatgggaaatgcaatagtaattttttatcataaaagttgtaaagtaaataataaaacaataaatattgaactagtagtacgtatattgagcaatcagaaatgatgctggtacctcttatcacggtgaccgtagttgcgggaacaatattagtatgttatatattatatatttgtaggaaaaagatacgtactgtctataatgacaataaaattatcatgacaaaattaaaaaagataaagagttctaattccagcaaatctagtaaatcaactgatagcgaatcagactgggaggatcactgtagtgctatggaacaaaacaatgacgtagataatatttctaggaatgagatattggacgatgatagcttcgctggtagtttaatatgggataacgaatccaatgttatggcgcctagcacagaacacatttacgatagtgttgctggaagcacgctgctaataaataatgatcgtaatgaacagactatttatcagaacactacagtagtaattaatgaaacggagactgttgaagtacttaatgaagataccaaacagaatcctaactattcatccaatcctttcgtaaattataataaaaccagtatttgtagcaagtcaaatccgtttattacagaacttaacaataaatttagtgagaataatccgtttagacgagcacatagcgatgattatcttaataagcaagaacaagatcatgaacacgatgatatagaatcatcggtcgtatcattggtgtgattagtttcctttttataaaattgaagtaatatttagtattattgctgccgtcacgttgtacaaatggagatattccctgtattcggcatttctaaaattagcaattttattgctaataatgactgtagatattatatagatacagaacatcaaaaaattatatctgatgagatcaatagacagatggatgaaacggtacttcttaccaacatcttaagcgtagaagttgtaaatgacaatgagatgtaccatcttattcctcatagattatcgacgattatactctgtattagttctgtcggaggatgtgttatctctatagataatgacatcaatggcaaaaatattctaacctttcccattgatcatgctgtaatcatatccccactgagtaaatgtgtcgtagttagcaagggtcctacaaccatattggttgttaaagcggatatacctagcaaacgattggtaacatcgtttacaaacgacatactatatgtaaacaatctgtcactgattaattatttgccgttgtctgtattcattattagacgagtcaccgactatttggatagacacatatgcgatcagatatttgctaataataagtggtattcccttataaccatcgacgataagcaatatcctattccatcaaactgtataggtatgtcctctgccaagtacataaattctagcatcgagcaagatactttaatccatgtttgtaacctcgagcatccgttcgactcagtatacaaaaaaatgcagtcgtacaattctctacctatcaaggaacaaatattgtacggtagaattgataatataaatatgagcattagtatttctgtggattaatagatttctagtatggggatcattaatcatctctaatctctaaatacctcataaaacgaaaaaaaagctattatcaaatactgtacggaatggattcattctcttctctttttatgaaactctgttgtatatctactgataaaactggaagcaaaaaatctgatagaaagaataagaataagatcaaggattatatggaacacgattattataaaataacaatagttcctggttcctcttccacgtctactagctcgtggtattatacacatgcctagtaatagtctctttgcgttgacggaaagcagactagaaataacaggctaaaatgttcagacaccataatagttcccaacccagataataacagagttccatcaacacattcctttaaactcaatcccaaacccaaaaccgttaaaatgtatccggccaattgatagtagataatgaggtgtacagcgcatgataatttacacagtaaccaaaatgaaaatactttagtaattataagaaatatagacggtaatgtcatcatcaacaatccgataatatgcctgagagtaaacattgacggataaaacaaaaatgctccgcataactctatcatggcaataacacaaccaaatacttgtaagattcctaaattagtagaaaatacaacgaatatcgatgtataagtgatctcgagaaataataagaataaagtaatgcccgtaaagataaacatcaacattgtttggtaatcattaaaccaattagtatgaagttgaactaatttcacagtagattttattccagtgttatcctcgcatgtataagtacctggtaagatatctttatattccataatcaatgagacatcactatctgataacgaatgaagtctagcactagtatgccatttacttaatattgtcgtcttggaagttttattataagttaaaatatcatggttatccaatttccatctaatatactttgtcggattatctatagtacacggaataatgatggtatcattacatgctgtatactctatggtctttgtagttgttataacaaccaacgtatagaggtatatcaacgatattctaactcttgacattttttatttatttaaaatgatacctttgttatttattttattctattttgctaacggtattgaatggcataagtttgaaacgagtgaagaaataatttctacttacttattagacgacgtattatacacgggtgttaatggggcggtatacacattttcaaataataaactaaacaaaactggtttaactaataataattatataacaacatctataaaagtagaggatgcggataaggatacattagtatgcggaaccaataacggaaatcccaaatgttggaaaatagacggttcagacgacccaaaacatagaggtagaggatacgctccttatcaaaatagcaaagtaacgataatcagtcacaacggatgtgtactatctgacataaacatatcaaaagaaggaattaaacgatggagaagatttgacggaccatgtggttatgatttattcacggcggataacgtaattccaaaagatggtttacgaggagcattcgtcgataaagacggtacttatgacaaagtttacattcttttcactgatactatcggctcaaagagaattgtcaaaattccgtatatagcacaaatgtgcctaaacgacgaaggtggtccatcatcattgtctagtcatagatggtcgacgtttctcaaagtcgaattagaatgtgatatcgacggaagaagttatagacaaattattcattctagaactataaaaacagataatgatacgatactatatgtattcttcgatagtccttattccaagtccgcattatgtacctattctatgaataccattaaacaatctttttctacgtcaaaattggaaggatatacaaagcaattgccgtctccagctcctggtatatgtttaccagctggaaaagttgttccacataccacgtttgaagtcatagaacaatataatgtactagatgatattataaagcctttatctaaccaacctatcttcgaaggaccgtctggtgttaaatggttcgatataaaggagaaggaaaatgaacatcgggaatatagaatatacttcataaaagaaaattctatatattcgttcgatacaaaatctaaacaaactcgtagctcgcaagtcgatgcgcgactattttcagtaatggtaactgcgaaaccgttatttatagcagatatagggataggagtaggaatgccacaaatgaaaaaaatacttaaaatgtaatcttaatcgagtacaccacacgacaatgaacaaacataagacagattatgctggttatgcttgctgcgtaatatgcggtctaattgtcggaattatttttacagcgacactattaaaagttgtagaacgtaaattagttcatacaccattaatagataaaacgataaaagatgcatatattagagaagattgtcctactgactggataagctataataataaatgtatccatttatctactgatcgaaaaacctgggaggaaggacgtaatgcatgcaaagctctaaattcaaattcggatctaattaagatagagactccaaacgagttaagttttttaagaagccttagacgaggctattgggtaggagaatccgaaatattaaaccagacaaccccatataattttatagctaagaatgccacgaagaatggaactaaaaaacggaaatatatttgtagcacaacgaatactcccaaactgcattcgtgttacactatataacaattacactacatttttatcataccactacttcggttagatgttttagaaaaaaataaatatcgccgtaccgttcttgtttttataaaaataacaattaacaattatcaaattttttctttaatattttacgtggttgaccattcttggtggtaaaataatctcttagtgttggaatggaatgctgtttaatgtttccacactcatcgtatattttgacgtatgtagtcacatcgtttacgcaatagtcagactgtagttctatcatgcttcctacatcagaaggaggaacagttttaaagtctcttggttttaatctattaccgttagttttcatgaaatcctttgttttatccacttcacattttaaataaatgtccactatacattcttttgttaattttactagatcgtcatgggtcatagaatttataggttccgtagtccatggatccaaactagcaaacttcgcgtatacggtatcgcgattagtgtatacaccaactgtatgaaaattaagaaaacagtttaataaatcaacagaaatatttaatcctccgtttgatacagatgcgccatatttatggatttcggattcacacgttgtttgtctgaggtgttcgtctagtgttgcttctacgtaaacttcgattcccatatattctttattgtcagaatcgcataccgatttatcatcatacactgtttgaaaactaaatggtatacacatcaaaataataaataataacgagtacattctgcaatattgttatcgtaattggaaaaatagtgttcgagtgagttggattatgtgagtattggattgtatattttattttatattttgtaataagaataaaatgctaatgtcaagtttattccaatagatgtcttattaaaaacatatataataaataacaatggctgaatggcataaaattatcgaggatatctcaaaaaataataagttcgaggatgccgccatcgttgattacaagactacaaagaatgttctagctgctattcctaacagaacatttgccaagattaatccgggtgaaattattcctctcatcactaatcgtaatattctaaaacctcttattggtcagaaatattgtattgtatatactaactctctaatggatgagaacacgtatgctatggagttgcttactgggtacgcccctgtatctccgatcgttatagcgagaactcataccgcacttatatttttgatgggtaagccaacaacatccagacgtgacgtgtatagaacgtgtagagatcacgctacccgtgtacgtgcaactggtaattaaaataaaaagtaatattcatatgtagtgtcaattttaaatgatgatgatgaaatggataatatccatattgacgatgtcaataatgccggtattggcatacagttcatcgatttttagatttcattcagaggatgtggaattatgttatgggcatttgtattttgataggatctataatgtagtaaatataaaatataatccgcatattccatatagatataattttattaatcgcacgttaaccgtagatgaactagacgataatgtcttttttacacatggttattttttaaaacacaaatatggttcacttaatcctagtttgattgtctcattatcaggaaacttaaaatataatgatatacaatgctcagtaaatgtatcgtgtctcattaaaaatttggcaacgagtacatctactatattaacatctaaacataagacttattctctacatcggtccacgtgtattactataataggatacgattctattatatggtataaagatataaatgacaagtataatgacatctatgattttactgcaatatgtatgctaatagcgtctacattgatagtgaccatatacgtgtttaaaaaaataaaaatgaactcttaattatgctatgctattagaaatggataaaatcaaaattacggttgattcaaaaattggtaatgttgttaccatatcgtataacttggaaaagataactattgatgtcacacctaaaaagaaaaaagaaaaggatgtattattagcgcaatcagttgctgtcgaagaggcaaaagatgtcaaggtagaagaaaaaaatattatcgatattgaagatgacgatgatatggatgtagaaagcgcgtaatacgatctataaaaataagtatataaatactttttatttactgtactcttactgtgtagtggtgataccctactcgattatttttttaaaaaaaaaatacttattctgattcttctagccatttccgtgttcgtttgaatgccacatcgacgtcaaagataggggagtagttgaaatctagttctgcattgttggtacgcacctcaaatgtagtgttggatatcttcaacgtatagttgttgagtagtgatggttttctaaatagaattctcttcatatcattcttgcacgcgtacatttttagcatccatcttggaatcctagatccttgttctattcccaatggtttcatcaatagaagattaaacatatcgtacgaacacgatggagagtaatcgtagcaaaagtaagcatttcctttaatcttagatcccggatactggatatattttgcagccaacacgtgcatccatgcagcatttcctacatatacccggctatgcaccgcgtcatcatcgactgtacgatacataatgttaccgtgttgcttacattgctcgtaaaagactttcatcaatttgtctccttctccgtaaattccagtgggtcttaggcaacaagtatacaattttgctccattcatgattacggaattattggctttcataaccagttgctcggccatacgtttactttttgcgtatacatgtcctggtgatatatcataaagggtatgctcatggccgatgaatggatcaccgtgtttattgggtcctattgcttccatgctactagtatagatcaaatacttgattcctaggtccacacaagctgccaaaatagtctgtgttccataatagtttactttcatgatttcattatcggtgtattttccaaatacatccactagagcagccgtatgaataatcagatttaccccatctagcgcttctctcaccttatcaaagtcgtttatatcacattgtatatagtttataaccttaactttcgaggttattggttgtggatcttctacaatatctatgactctgatttcttgaacatcatctgcactaattaacagttttactatatacctgcctagaaatccggcaccaccagtaaccgcgtacacggccattgctgccactcataatatcagactacttattctattttactaaataatggctgtttgtataatagaccacgataatatcagaggagttatttactttgaaccagtccatggaaaagataaagttttaggatcagttattggattaaaatccggaacgtatagtttgataattcatcgttacggagatattagtcaaggatgtgattccataggcagtccagaaatatttatcggtaacatctttgtaaacagatatggtgtagcatatgtttatttagatacagatgtaaatatatttacaattattggaaaggcgttatctatttcaaaaaatgatcagagattagcgtgtggagttattggtatttcttacataaatgaaaagataatacattttcttacaattaacgagaatggcgtttgatatatcagttaatgcgtctaaaacaataaatgcattagtttacttttctactcagcaaaataaattagtcatacgtaatgaagttaatgatacacactacactgtcgaatttgatagggacaaagtagttgacacgtttatttcatataatagacataatgacaccatagagataagaggggtgcttccagaggaaactaatattggttgcgcggttagtatgacttacttgtataataagtatagttttaaactgattttagcagaatatataagacacagaaatactatatccggcaatatttattcggcattgatgacactagatgatttggctattaaacagtatggagacattgatctattatttaatgagaaacttaaagtagactccgattcgggactatttgactttgtcaactttgtaaaggatatgatatgttgtgattctagaatagtagtagctctatctagtctagtatctaaacattgggaattgacaaataaaaaatataggtgtatggcattagccgaacatatatctgatagtattccaatatctgagctatctagactacgatacaatctatgtaagtatctacgcggacacactgagagcatagaggataaatttgattattttgaagacgatgattcgtctacatgttctgccgtaaccgacagggaaacggatgtataattttttttatagcgtgaaggatatgataaaaaatataattgttgtatttatcccattccaatcaccttatatgattctgtaacacaataaaggagtcttatagatgtatagaggtcagatactggtttgataaactgtttattccacataagtatgtttgactttatggttagacccgcatactttaacaaatcactgaaaattggagttaggtattgacctctcagaatcagttgccgttctggaacattaaatgtattttttatgatatactccaacgcatttatgtgggcatacaacaagtcattactaatggaatattccaagagttttagttgtctagtatttaacaagagaagagatttcaacagactgtttatgaactcgaatgccgcctcattgtcgcttatattgatgatgtcgaattctcccaatatcatcaccgatgagtagctcatcttgttatcgggatccaagttttctaaagatgtcattaaaccctcgatcatgaatggatttatcatcatcgtttttatgttggacatgagcttagtccgtttgtccacatctatagaagatgatttctgaattatttcatatatctctctctttaactccaggaacttgtcaggatggtctactttaatatgttctcgtctaagagatgaaaatctttggatggttgcacgcgacttttctctaaaggatgacgttgcccaagatcctctcttaaatgaatccatcttatccttggacaagatggacagtctattttccttagatggtttaatatttttgttacccatgatctataaaggtagacctaatcgtctcggatgaccatatatttattttcagttttattatacgcataaattgtaaaaaatatgttaggtttacgaaaatgtctcgtggggcattaatcgtttttgaaggattggacaaatctggaaaaacaacacaatgtatgaacatcatggaatcaataccttcaaacacaataaaataccttaactttcctcagagatccactgtcactggaaagatgatagatgactatctaactcgtaaaaaaacctataatgatcatatagttaatctattattttgtgcaaatagatgggagtttgcatcttttatacaagaacaactagaacagggaattactttaatagttgatagatacgcattttctggagtagcgtatgccgccgctaaaggcgcgtcaatgactctcagtaagagttatgaatctggattgcctaaacccgacttagttatattcttggaatctggtagcaaagaaattaatagaaacgtcggtgaggaaatttatgaagatgttacattccaacaaaaggtattacaagaatataaaaaaatgattgaagaaggagatattcattggcaaattatttcttctgaattcgaggaagatgtaaagaaggagttgattaagaatatagttatagaggctatacacacggttactggaccagtggggcaactgtggatgtaatagtgaaattacattttttataaatagatgttagtacagtgttataaatggatgaagcatattactctggcaacttggaatcagtactcggatacgtgtccgatatgcataccgaactcgcatcaatatctcaattagttattgccaagatagaaactatagataatgatatattaaacaaggacattgtaaattttatcatgtgtagatcaaacttggataatccatttatctctttcctagatactgtatatactattatagatcaagagaactatcagactgagttgattaattcattagacgacaatgaaattatcgattgtatagttaataagtttatgagcttttataaggataacctagaaaatatagtagatgctatcattactctaaaatatataatgaataatccagattttaaaactacgtatgccgaagtactcggttccagaatagccgatatagatattaaacaagtgatacgtaagaatatactacaattgtctaataatatccgcgaacgatatttgtgaaaatattaaaaaaaaatactttttttattaaatgacgtcttttcgtgaatttagaaaattatgctgtgctatatatcacgcatcaggatataaagaaaaatctaaattaattagagactttataacagatagggatgataaatatttgatcattaagctattgcttcccggattagacgatagaatttataacatgaacgataaacaaattataaaattatatagtataatatttaaacaatctcaggaagatatgctacaagatttaggatacggatatataggagacactattaggactttcttcaaagagaacacagaaatccgtccacgagataaaagcattttaactttagaagaagtggatagttttttaactacgttatcatccgtaactaaagaatcgcatcaaataaaattattgactgatgtagcatctgtttgtacatgtaatgatttaaaatgtgtagtcatgcttattgataaagatctaaaaattaaagcgggtcctcggtacgtacttaacgctattagtcctaatgcctatgatgtgtttagaaaatctaataacttgaaagagataatagaaaattcatctaaacaaaatctagactctatatctatttctgttatgactccaattaatcccatgttagcggaatcgtgtgattctgtcaataaggcgtttaaaaaatttccatcaggaatgtttgcggaagtcaaatacgatggtgaaagagtacaagttcataaaaataataacgagtttgccttctttagtagaaacatgaaaccagtactctctcataaagtggattatctcaaagaatacataccgaaagcatttaaaaaagctacgtctatcgtattggattctgaaattgttcttgtagacgaacataatgtaccgctcccgtttggaagtttaggtatacacaaaaagaaagaatataaaaactctaacatgtgtttgttcgtgtttgactgtttgtactttgatggattcgatatgacggacattccattgtacgaacgaagatcttttctcaaagatgttatggttgaaatacccaatagaatagtattctcagagttgacgaatattagtaacgagtctcagttaactgacgtattggatgatgcactaacgagaaaattagaaggattggtcttaaaagatattaatggagtatacgaaccgggaaagagaagatggttaaaaataaagcgagactatttgaacgagggttccatggcagattctgccgatttagtagtactaggtgcctactatggtaaaggagcaaagggtggtatcatggcagtctttctaatgggttgttacgacgatgaatccggtaaatggaagacggttaccaagtgttcaggacacgatgataatacgttaagggagttgcaagaccaattaaagatgattaaaattaacaaggatcccaaaaaaattccagagtggttagtagttaataaaatctatattcccgattttgtagtagaggatccgaaacaatctcagatatgggaaatttcaggagcagagtttacatcttccaagtcccataccgcaaatggaatatccattagatttcctagatttactaggataagagaggataaaacgtggaaagaatctactcatctaaacgatttagtaaacttgactaaatcttaatagttacatacaaactgaaaattaaaataacactatttagttggtggtcgccatggatggtgttattgtatactgtctaaacgcgctagtaaaacatggcgaggaaataaatcatataaaaaatgatttcatgattaaaccatgttgtgaaagagtttgtgaaaaagtcaagaacgttcacattggcggacaatctaaaaacaatacagtgattgcagatttgccatatatggataatgcggtatccgatgtatgcaattcactgtataaaaagaatgtatcaagaatatccagatttgctaatttgataaagatagatgacgatgacaagactcctactggtgtatataattattttaaacctaaagatgccattcctgttatcatatctataggaaaggataaagatgtctgtgaactattaatctcatcagacatatcgtgtgcatgcgtggagttaaattcatatcacgtagccattcttcccatggatgtttccttttttaccaaaggaaatgcatcattgattattctcctgtttgatttctctatcgatgcggcacctctcttaagaagtgtaaccgataataatgttattatatctagacaccagcgtctacatgacgagcttccgagttccaattggttcaagttttacataagtataaagtccgactattgttctatattatatatggttgttgatggatctgtgatgcatgcgatagctgataatagaactcacgcaattattagcaaaaatatattagacaatactacgattaacgatgagtgtagatgctgttattttgaaccacagattaggattcttgatagagatgagatgctcaatggatcatcgtgtgatatgaacagacattgtattatgatgaatttacctgatgtaggcgaatttggatctagtatgttggggaaatatgaacctgacatgattaagattgctctttcggtggctggtaatttaataagaaatcgagactacattcccgggagacgaggatatagctactacgtttacggtatagcctctagataatttttttaagcacgaaataaaaaacataattttaaaccaatctatttcatactattttgtgtgatcaccatggacataaagatagatattagtatttctggtgataaatttacggtgactactaggagggaaaatgaagaaagaaaaaaatatctacctctccaaaaagaaaaaactactgatgttatcaaacctgattatcttgagtacgatgacttgttagatagagatgagatgtttactattctagaggaatattttatgtacagaggtctattaggcctcagaataaaatatggacgactctttaacgaaattaaaaaattcgacaatgatgcggaagaacaattcggtactatagaagaactcaagcagaaacttagattaaattctgaagagggagcagataactttatagattatataaaggtacaaaaacaggatatcgtcaaacttactgtatacgattgcatatctatgataggattgtgtgcatgcgtggtagatgtttggagaaatgagaaactgttttctagatggaaatattgtttacgagcgattaaactgtttattgatgatcacatgcttgataagataaaatctatactgcagaatagactagtatatgtggaaatgtcatagaaagttaaaagttaatgagagcaaaaatatataaggttgtattccatatttgttatttttttctgtaatagttagaaaaatacattcgatggtctatctatcagattattatgtgttataaggtactttttctcataataaactagagtatgagtaagatagtgtttttcaaaacatataaatctaaaattgatggatgagatatacagctattaatttcgaaaatatattttaatctgataactttaaacatggatttttaatggtggtttaacgttttaaaaaaagattttgttattgtagtatatgataatattaaaagatggatataaagaatttgctgactgcatgtactattttttacattactacattggctacggcagatatacctacttcgtcactgccacacgctccggtaaacggggcatgtgacgagggagaatatcttgataagaggcataatcaatgttgtaatcagtgtccacctggagaatttgccaaggttagatgtaatggtaacgataacacaaaatgtgaacgctgcccacctcatacatataccgcaatccccaattactctaatggatgtcatcaatgtagaaaatgcccaacaggatcatttgataaggtaaagtgtaccggaacacagaacagtaaatgttcgtgtcttcctggttggtattgcgctactgattcttcacagactgaagattgtcgagattgtataccaaaaaggagatgtccatgcggatactttggtggaatagatgaacaaggaaatcctatttgtaaatcgtgttgtgttggtgaatattgcgactacctacgtaattatagacttgatccatttcctccatgcaaactatctaaatgtaattaattatgattttgatgataatgttaccatacattatatcgctacttggttagtgtattattcagtatgaagacctattaataattacttatcttttgacgatcttgttataattataatataaaaatacttatggcatagtaactcataattgctgacgcgataaattcgtaataatctgttttgttcaaatttttataaggaatctacaggcataaaaataaaaatataatttataatatactcttacagcgcgccatcatgaataacagcagtgaattgattgctgttattaatggatttagaaatagtggacgattttgtgatattaatatagttattaatgatgaaaggataaacgctcacagactcatcctatctggagcctccgaatatttttccattctgttttccaataattttatcgattctaatgaatacgaagttaatctaagtcatttagattatcaaagtgttaacgatttgatcgattacatttatgggatacctttgagcctaactaacgataacgtgaaatatattctttcaaccgctgattttttacaaattggatctgctattacggagtgtgaaaattacatacttaaaaatctttgttctagaaactgtatcgatttctacatatacgctgataaatataataacaagaaaatagaatcagcgtcgtttaacacaatattacaaaatattttgagactcatcaacgatgaaaactttaaatacttaacagaggaatcaatgataaaaattttaagcgatgatatgttaaatataaaaaatgaggatttcgccccactaattctcattaaatggttagagagtactcaacaaccatgcaccgtcgagttacttaaatgcctcagaatatcattgctttccccacaagttataaaatcactttatagtcatcgactggttagttcaatctacgaatgtataacattcttaaacaatatagcattcttggatgaatcatttcctagataccatagcatcgagttgatatctatcggtataagtaattcgcatgataagatttccataaactgctacaatcataaaaaaaatacatgggaaatgatatcttcacgtagatataggtgtagtttcgcagtggccgtcctggataatattatctatatgatgggtggatatgatcagtccccgtatagaagttcaaaggttatagcgtacaatacatgtacaaattcttggatatatgatataccagagctaaaatatcctcgttctaattgtgggggactggctgatgacgaatacatttattgtataggcggcatacgcgatcaggattcatcgttgacatctagtattgatagatggaagccatcaaaaccatattggcagaagtatgctaaaatgcgcgaaccaaaatgtgatatgggggttgcgatgttaaacggattaatatatgttataggtggaatcgttaaaggtgacacgtgtaccgacgcactagagagtttatcagaagatggatggatgaagcatcaacgtcttccaataaaaatgtccaatatgtcgacgattgttcatgatggcaagatttatatatctggaggttacaacaatagtagtgtagttaatgtaatatcgaatctagtccttagctataattcgatatatgatgaatggaccaaattatcatcattaaacattcctagaattaatcccgctctatggtcagcgcataataaattatatgtaggaggaggaatatctgatgatgttcgaactaatacatctgagacatacgacaaagaaaaagattgttggacattggataatggtcacgtgttaccacgcaattatataatgtataaatgcgaaccgattaaacataaatatccattggaaaaaacacagtacacgaatgattttctaaagtatttggaaagttttataggtagttgatagaacaaaatacataattttgtaaaaataaatcactttttatactaatatgacacgattaccaatacttttgttactaatatcattagtatacgctacaccttttcctcagacatctaaaaaaataggtgatgatgcaactctatcatgtaatcgaaataatacaaatgactacgttgttatgagtgcttggtataaggagcccaattccattattcttttagctgctaaaagcgacgtcttgtattttgataattataccaaggataaaatatcttacgactctccatacgatgatctagttacaactatcacaattaaatcattgactgctagagatgccggtacttatgtatgtgcattctttatgacatcaactacaaatgacactgataaagtagattatgaagaatactccacagagttgattgtaaatacagatagtgaatcgactatagacataatactatctggatctacacattcaccggaaactagttctgagaaacctgattatatagataattctaattgctcgtcggtattcgaaatctaagctcaaaaattgaaaaactagcgtctttttttgctcgaagtcgaccaccatggtgggtgaggatagcgtgctgatcaccgagaacatgcacatgaaactgtacatggagggcaccgtgaacgaccaccacttcaagtgcacatccgagggcgaaggcaagccctacgagggcacccagaccatgaagatcaaggtggtcgagggcggccctctccccttcgccttcgacatcctggctaccagcttcatgtacggcagcaaaacctttatcaaccacacccagggcatccccgacttctttaagcagtccttccctgagggcttcacatgggagaggatcaccacatacgaagacgggggcgtgctgaccgctacccaggacaccagcctccagaacggctgcctcatctacaacgtcaagatcaacggggtgaacttcccatccaacggccctgtgatgcagaagaaaacactcggctgggaggccagcaccgagatgctgtaccccgctgacagcggcctgagaggccatagccagatggccctgaagctcgtgggcgggggctacctgcactgctccctcaagaccacatacagatccaagaaacccgctaagaacctcaagatgcccggcttctacttcgtggacaggagactggaaagaatcaaggaggccgacaaagagacctacgtcgagcagcacgagatggctgtggccaggtactgcgacctgcctagcaaactggggcacagctgattaattaatttttatcgatctaattcaacaatgtctggagagcttcgcaggatcccgactccggaaccaattactgataaagaagatcatacagttacagacactgtctcatacactacagtaagtacatcatctggaattgtcactactaaatcaaccaccgatgatgcggatctttatgatacgtacaatgataatgatacagtaccaccaactactgtaggcggtagtacaacctctattagcaattataaaaccaaggactttgtagaaatatttggtattaccgcattaattatattgtcggccgtggcaattttctgtattacatattatatatataataaacgttcacgtaaatacaaaacagagaacaaagtctagatttttgacttacataaatgtctgggatagtaaaatctatcatattgagcggaccatctggtttaggaaagacagccatagccaaaagactatgggaatatatttggatttgtggtgtcccataccactagatttcctcgtcctatggaacgagaaggtgttgattaccattacgttaacagagaggccatctggaagggaatagccgccggaaactttctagaacatactgagtttttaggaaatatttacggaacttctaaaacagctgtgaatacagcggctattaataatcgtatttgtgtgatggatctaaacatcgacggtgttagaagtcttaaaaatacgtacctaatgccttactcggtgtatataagacctacctctcttaaaatggttgagaccaagcttcgtcgtagaaacactgaagctaacgatgagattcatcgtcgtgtgatgttggcaaaaactgacatggatgaggcaggtgaagccggtctattcgacactattatcattgaagatgatgtgaatttagcatatagtaagttaattcagatactacaggaccgtattagaatgtattttaacactaattagagacttaagacttaaaacttgataattaataatataactcgtttttatatgtgtctatttcaacgtctaatgtattagttaaatattaaaacttaccacgtaaaacttaaaatttaaaatgatatttcattgacagatagatcacacattatgaactttcaaggacttgtgttaactgacaattgcaaaaatcaatgggtcgttggaccattaataggaaaaggtggattcggtagtatttatactactaatgacaataattatgtagtaaaaatagagcccaaagctaacggatcattatttaccgaacaggcattttatactagagtacttaaaccatccgttatcgaagaatggaaaaaatctcacaatataaagcacgtaggtcttatcacgtgcaaggcatttggtctatacaaatccattaatgtggaatatcgattcttggtaattaatagattaggtgcagatctagatgcggtgatcagagccaataataatagactaccaaaaaggtcggtgatgttgatcggaatcgaaatcttaaataccatacaatttatgcacgagcaaggatattctcacggagatattaaagcgagtaatatagtcttagatcaaatagataagaataaattatatctagtggattacggattggtttctaaattcatgtctaatggcgaacatgttccatttataagaaatccaaataaaatggataacggtactctagaatttacacctatagattcgcataaaggatacgttgtatctagacgtggagatctagaaacacttggatattgtatgattagatggttgggaggtatcttaccatggactaagatatctgaaacaaagaattgtgcattagtaagtgccacaaaacagaaatatgttaacaatactgcgactttgttaatgaccagtttgcaatatgcacctagagaattgctgcaatatattaccatggtaaactctttgacatattttgaggaacccaattacgacaagtttcggcacatattaatgcagggtgtatattattaagtgtggtgtttggtcgataaaaattaaaaaataacttaatttattattgatctcgtgtgtacaaccgaaatcatggcgatgttttacgcacacgctctcggtgggtacgacgagaatcttcatgcctttcctggaatatcatcgactgttgccaatgatgtcaggaaatattctgttgtgtcagtttataataacaagtatgacattgtaaaagacaaatatatgtggtgttacagtcaggtgaacaagagatatattggagcactgctgcctatgtttgagtgcaatgaatatctacaaattggaaatccgatccatgatcaagaaggaaatcaaatctctatcatcacatatcgccacaaaaactactatgctctaagcggaatcgggtacgagagtctagacttgtgtttggaaggagtagggattcatcatcacgtacttgaaacaggaaacgctgtatatggaaaagttcaacatgattattctactatcaaagagaaggccaaagaaatgagtgcacttagtccaggacctatcatcgattaccacgtctggataggagattgtatctgtcaagttactgctgtggacgtacatggaaaggaaattatgaaaatgagattcaaaaagggtgcggtgcttccgatcccaaatctggtaaaagttaaacttggggagaatgatacagaaaatctttcttctactatatcggcggcaccatcgaggtaaccacctctctggaagacagcgtgaatcatgtactcatgaaacgtttggaaactatacgccatatgtggtctgttgtatatgatcattttgatattgtgaatggtaaagaatgctgttatgtgcatacgcattcatctaatcaaaatcctataccgagtactgtaaaaacaaatttgtacatgaagactatgggatcatgcattcaaatggattccatggaagctctagagtatcttagcgaactgaaggaatcaggtggatggagtcccagaccagaaatgcaggaatttgaatatccagatggagtggaagacactgaatcaattgagagattggcagaggagttcttcaatagatcagaacttcaggctggtgaatcagtcaaatttggtaattctattaattgttaaacatacatctgtttcagctaagcaactaagaacacgtatacggcagcagcttccttctatactctcatcttttaccaacacaaagggtggatatttgttcattggagttgataataatacacacaaagtatttggattcacggtgggttacgactacctcagactgatagagaatgatatagaaaagcatatcaaaagacttcgtgttgtgcatttctgtgagaagaaagaggacatcaagtacgcgtgtcgattcatcaaggtatataaacctggggatgagactacctcgacatacgtgtgcgctatcaaagtggaaagatgctgttgtgctgtgtttgcagattggccagaatcatggtatatggatactaatggtatcaagaagtattctccagatgaatgggtgtcacatataaaattttaattaatgtaactatagagaacaaataataaggttgtaatatcatatagacaataactaacaattaattagtaactgttatctcttttttaactaaccaactaactatatacctattaatacatcgtaattatagttcttaacatctattaatcattaattcgcttctttaattttttataaactaacattgttaattgaaaagggataacatgttacagaatataaattatatatggatttttttaaaaaggaaatacttgactggagtatatatttatctcttcattatatagcacgcgtgttttccaatttttccacatcccatataatacaggattataatctcgttcgaacatacgagaaagtggataaaacaatagttgattttttatctaggttgccaaatttattccatattttagaatatggggaaaatattctacatatttattctatggatgatgctaatacgaatattataattttttttctagatagagtattaaatattaataagaacgggtcatttatacacaatctcgggttatcatcatccattaatataaaagaatatgtatatcaattagttaataatgatcatccagataataggataagactaatgcttgaaaatggacgtagaacaagacattttttgtcctatatatcagatacagttaatatctatatatgtattttaataaatcatggattttatatagatgccgaagacagttacggttgtacattattacatagatgtatatatcactataagaaatcagaatcagaatcatacaatgaattaattaagatattgttaaataatggatcagatgtagataaaaaagatacgtacggaaacacaccttttatcctattatgtaaacacgatatcaacaacgtggaattgtttgagatatgtttagagaatgctaatatagactctgtagactttaatagatatacacctcttcattatgtctcatgtcgtaataaatatgattttgtaaagttattaatttctaaaggagcaaatgttaatgcgcgtaataaattcggaactactccattttattgtggaattatacacggtatctcgcttataaaactatatttggaatcagacacagagttagaaatagataatgaacatatagttcgtcatttaataatttttgatgctgttgaatctttagattatctattatccagaggagttattgatattaactatcgtactatatacaacgaaacatctatttacgacgctgtcagttataatgcgtataatacgttggtctatctattaaacaaaaatggtgattttgagacgattactactagtggatgtacatgtatttcggaagcagtcgcaaacaacaacaaaataataatggaagtactattgtctaaacgaccatctttgaaaattatgatacagtctatgatagcaattactaaacataaacagcataatgcagatttattgaaaatgtgtataaaatatactgcgtgtatgaccgattatgatactcttatagatgtacagtcgctacagcaatataaatggtatattttaagatgtttcgatgaaatagatatcatgaagagatgttatataaaaaataaaactgtattccaattagttttttgtatcaaagacattaatactttaatgagatacggtaaacatccttctttcgtgaaatgcactagtctcgacgtatacggaagtcgtgtacgtaatatcatagcatctattagatatcgtcagagattaattagtctattatccaagaagctggatcctggagataaatggtcgtgttttcctaacgaaataaaatataaaatattggaaaactttaacgataacgaactatccacatatctaaaaatcttataaacattattaaaatataaaatctaagtaggataaaatcacactacatcattgtttccttttagtgctcgacagtgtatactatttttaacgctcataaataaaaatgaaaacgatttccgttgttacgttgttatgcgtactacctgctgttgtttattcaacatgtactgtacccactatgaataacgctaaattaacgtctaccgaaacatcgtttaatgataaccagaaagttacgtttacatgtgatcagggatatcattctttggatccaaatgctgtctgtgaaacagataaatggaaatacgaaaatccatgcaaaaaaatgtgcacagtttctgattatgtctctgaactatataataaaccgctatacgaagtgaattccaccatgacactaagttgcaacggcgaaacaaaatattttcgttgcgaagaaaaaaatggaaatacttcttggaatgatactgttacgtgtcctaatgcggaatgtcaacctcttcaattagaacacggatcgtgtcaaccagttaaagaaaaatactcatttggggaatatatgactatcaactgtgatgttggatatgaggttattggtgcttcgtacataagttgtacagctaattcttggaatgttattccatcatgtcaacaaaaatgtgatatgccgtctctatctaacggattaatttccggatctacattttctatcggtggcgttatacatcttagttgtaaaagtggttttacactaacggggtctccatcatccacatgtatcgacggtaaatggaatcccatactcccaatatgtgtacgaactaacgaaaaatttgatccagtggatgatggtcccgacgatgagacagatttgagcaaactctcgaaagacgttgtacaatatgaacaagaaatagaatcgttagaagcaacttatcatataatcatagtggcgttgacaattatgggcgtcatatttttaatctccgttatagtattagtttgttcctgtgacaaaaataatgaccaatataagttccataaattgctaccgtaaatataaatccgttaaaataattaataatttaataacaaacaagtatcaaaagattaaagacttatagctagaatcaattgagatgtcttcttcagtggatgttgatatctacgatgccgttagagcatttttactcaggcactattataacaagagatttattgtgtatggaagaagtaacgccatattacataatatatacaggctatttacaagatgcgccgttataccgttcgatgatatagtacgtactatgccaaatgaatcacgtgttaaacaatgggtgatggatacacttaatggtataatgatgaatgaacgcgatgtttctgtaagcgttggcaccggaatactattcatggaaatgtttttcgattacaataaaaatagtatcaacaatcaactaatgtatgatataattaatagcgtatctataattctagctaatgagagatatagaagcgcttttaacgacgatggtatatacatccgtagaaatatgattaacaagttgtacggatacgcatctctaactactattggcacgatcgctggaggtgtttgttattatctgttgatgcatctagttagtttgtataaataattatttcaatatactagttaaaattttaagattttaaatgtataaaaaactaataacgtttttatttgtaataggtgcattagcatcctattcgaataatgagtacactccgtttaataaactgagtgtaaaactctatatagatggagtagataatatagaaaattcatatactgatgataataatgaattggtgttaaattttaaagagtacacaatttctattattacagagtcatgcgacgtcggatttgattccatagatatagatgttataaacgactataaaattattgatatgtataccattgactcgtctactattcaacgcagaggtcacacgtgtagaatatctaccaaattatcatgccattatgataagtacccttatattcacaaatatgatggtgatgagcgacaatattctattactgcagagggaaaatgctataaaggaataaaatatgaaataagtatgatcaacgatgatactctattgagaaaacatactcttaaaattggatctacttatatatttgatcgtcatggacatagtaatacatattattcaaaatatgatttttaaaaatttaaaatatattatcacttcagtgacagtagtcaaataacaaacaacaccatgagatatattataattctcgcagttttgttcattaatagtatacatgctaaaataactagttataagtttgaatccgtcaattttgattccaaaattgaatggactggggatggtctatacaatatatcccttaaaaattatggcatcaagacgtggcaaacaatgtatacaaatgtaccagaaggaacatacgacatatccgcatttccaaagaatgatttcgtatctttctgggttaaatttgaacaaggcgattataaagtggaagagtattgtacgggactatgcgtcgaagtaaaaattggaccaccgactgtaacattgactgaatacgacgaccatatcaatttgtacatcgagcatccgtatgctactagaggtagcaaaaagattcctatttacaaacgcggtgacatgtgtgatatctacttgttgtatacggctaacttcacattcggagattctaaagaaccagtaccatatgatatcgatgactacgattgcacgtctacaggttgcagcatagactttgtcacaacagaaaaagtgtgcgtgacagcacagggagccacagaagggtttctcgaaaaaattactccatggagttcgaaagtatgtctgacacctaaaaagagtgtatatacatgcgcaattagatccaaagaagatgttcccaatttcaaggacaaaatggccagagttatcaagagaaaatttaatacacagtctcaatcttatttaactaaatttctcggtagcacatcaaatgatgttaccacttttcttagcatgcttaacttgactaaatattcataactaatttttattaatgatacaaaaacgaaataaaactgcatattatacactggttaacgcccttataggctctaaccattttcaagatgaggtccctgattatagtccttctgttcccctctatcatctactccatgtctattagacgatgtgagaagactgaagaggaaacatggggattgaaaatagggttgtgtataattgccaaagatttctatcccgaaagaactgattgcagtgttcatctcccaactgcaagtgaaggattgataactgaaggcaatggattcagggatatacgaaacaccgataaattataaaaaaagcaatgtgtccgctgtttccgttaataatactattttcgtaactggcggattattcataaataactctaatagcacgatcgtggttaacaatatggaaaaacttgacatttataaagacaaacaatggtcgattatagaaatgcctatggctagggtatatcacggcattgactcgacatttggaatgttatattttgccggaggtctatccgttaccgaacaatatggtaatttagagaaaaacaacgagatatcttgttacaatcctagaacgaataagtggtttgatatttcatatactatttataagatatccatatcatcattgtgtaaactaaataacgtcttctatgtatttagtaaggacattggatatgtggaaaagtatgatggtgcatggaagttagtacatgatcgtctccccgctataaaggcattatcaacttctccttattgattgaaaatgaaaatataaatagtttttatgtatagcagtattaccctatagttttattgcttactactaacatggatacagatgttacaaatgtagaagatatcataaatgaaatagatagagagaaagaagaaatactaaaaaatgtagaaattgaaaataataaaaacattaacaagaatcatcccaatgaatatattagagaagcactcgttattaataccagtagtaatagtgattccattgataaagaagttatagaatgtatcagtcacgatgtaggaatatagatcatatctactaatttttataatcgatacaaaacataaaaaacaactcgttattacatagcaggcatggaatccttcaagtattgttttgataacgatggcaagaaatggattatcggaaatactttatattctggtaattcaatactctataaggtcagaaaaaatttcactagttcgttctacaattacgtaatgaagatagatcacaaatcacacaagccattgttgtctgaaatacgattctatatatctgtattggatcctttgactatcgacaactggacacgggaacgtggtataaagtatttggctattccagatctgtatggaattggagaaaccgatgattatatgttcttcgttataaagaattcgggaagagtattcgccccaaaggatactgaatcagtcttcgaagcatgcgtcactatgataaacacgttagagtttatacactctcgaggatttacccatggaaaaatagaaccgaggaatatactgattagaaataaacgtctttcactaattgactattctagaactaacaaactatacaagagtggaaactcacatatagattacaacgaggacatgataacttcaggaaatatcaattatatgtgtgtagacaatcatcttggagcaacagtttcaagacgaggagatttagaaatgttgggatattgcatgatagaatggttcggtggcaaacttccatggaaaaacgaaagtagtataaaagtaataaaacaaaaaaaagaatataaaaaatttatagctactttctttgaggactgttttcctgaaggaaatgaacctctggaattagttagatatatagaattagtatacacgttagattattctcaaactcctaattatgacagactacgtaaactgtttatacaagattgaaattatattcttttttttatagagtgtggtagtgttacggatatctaatattaatattagactatctctatcgcgctacacgaccaatatcgattactatggatatcttctatgaaaggagagaatgtatttatttctccagcgtcaatctcgtcagtattgacaatactgtattatggagctaatggatccactgctgaacagctatcaaaatatgtagaaacggaggagaacacggataaggttagcgctcagaatatctcattcaaatccatgaataaagtatatgggcgatattctgccgtgtttaaagattcctttttgagaaaaattggcgataagtttcaaactgttgacttcactgattgtcgcactatagatgcaatcaacaagtgtgtagatatctttactgaggggaaaatcaatccactattggatgaaccattgtctcctagcaattagtgccgtatactttaaagcaaaatggttgacgccattcgaaaaggaatttaccagtgattatcccttttacgtatctccgacggaaatggtagacgtaagtatgatgtctatgtacggcaaggcatttaatcacgcatctgtaaaagaatcattcggcaacttttcaatcatagaactgccatatgttggagatactagtatgatggtcattcttccagacaagattgatggattagaatccatagaacaaaatctaacagatacaaattttaagaaatggtgtgactttatggatgctatgtttatagatgttcacattcccaagtttaaggtaacaggctcgtataatctggtggatactctagtaaagtcaggactgacagaggtgttcggttcaactggagattatagcaatatgtgtaatttagatgtgagtgtcgacgctatgatccacaaaacgtatatagatgtcaatgaagagtatacagaagcagctgcagcaacttctgtactagtggcagactgtgcatcaacaattacaaatgagttctgtgcagatcatccgttcatctatgtgattaggcatgttgatggaaaaattcttttcgttggtagatattgctctccgacaactaattgttaaccattttttttaaaaaaaatagaaaaaacatgtggtattagtgcaggtcgttgttcttccaattgcaattggtaagatgacggccaactttagtacccacgtcttttcaccacagcactgtggatgtgacagactgaccagtattgatgacgtcaaacaatgtttgactgaatatatttattggtcgtcctatgcataccgcaacaggcaatgcgctggacaattgtattccacactcctctcttttagagatgatgcggaattagtgttcatcgacattcgcgagctggtaaaaaatatgccgtgggatgatgtcaaagattgtacagaaatcatccgttgttatataccggatgagcaaaaaaccatcagagagatttcggccatcatcggactttgtgcatatgctgctacttactggggaggtgaagaccatcccactagtaacagtctgaacgcattgtttgtgatgcttgagatgctaaattacgtggattataacatcatattccggcgtatgaattgatgagttgtacatcttgacattttctttcttctcttctccctttcttctcttctcccttcctccctcttctccctttcccagaaacaaacttttttacccactataaaataaaatgagtatactacctattatatttcttcctatatttttttattcttcattcgttcagacttttaacgcgtctgaatgtatcgacaaagggcaatattttgcatcattcatggagttagaaaacgagccagtaatcttaccatgtcctcaaataaatacgctatcatccggatataatatattagatattttatgggaaaaacgaggagcggataatgatagaattataccgatagataatggtagcaatatgctaattctgaacccgacacaatcagactctggtatttatatatgcattaccacgaacgaaacctactgtgacatgatgtcgttaaatttgacaatcgtgtctgtctcagaatcaaatatagatcttatctcgtatccacaaatagtaaatgagagatctactggcgaaatggtatgtcccaatattaatgcatttattgctagtaacgtaaacgcagatattatatggagcggacatcgacgccttagaaataagagacttaaacaacggacacctggaattattaccatagaagatgttagaaaaaatgatgctggttattatacatgtgttttagaatatatatacggtggcaaaacatataacgtaaccagaattgtaaaattagaggtacgggatagaataataccttctactatgcaattaccagatggcattgtaacttcaataggtagtaatttgactattgcatgcagagtatcgttgagacctcccacaacggacaccgacgtcttttggataagtaatggtatgtattacgaagaagatgatggggacggaaacggtagaataagtgtagcaaataaaatctatatgaccgataagagacgtgttattacatcccggttaaacattaatcctgtcaaggaagaagatgctacaacgtttacgtgtatggcgtttactattcctagcatcagcaaaacagttactgttagtataacgtgaatgtatgttgttacatttccatgtcaattgagtttataagaatttttatacattatcttccaacaaacaattgacgaacgtattgctatgattaactcccacgatactatgcatattattaatcattaacttgcagactatacctagtgctattttgacatactcgtgttcttgtgtaattgcggtatctatattattaaagtacgtaaatctagctatagttttattatttaattttagataatataccgtctccttatttttaaaaattgccacatcctttattaaatcatgaatgggaatttctatgtcatcgttagtatattgtgaacaacaagagcagatatctataggaaagggtggaatgcgatacattgatctatgtagttttaaaacacacgcgaactttgaagaatttatataaatcattccatcgatacatccttctatgttgacatgtatatatccaggaattcttttattaatgtcaggaaatgtataaactaaaacattgcccgaaagcggtgcctctatctgcgttatatccgttcttaacttacaaaatgtaaccaatacctttgcatgacttgttttgttcggcaacgttagtttaaacttgacgaatggattaattacaatagcatgatccgcgcatctattaagtttttttactttaacgcccttgtatgtttttacagagactttatctaaatttctagtgcttgtatgtgttataaatataacgggatatagaaccgaatcacctaccttagatacccaattacattttatcagatccagataataaacaaattttgtcgccctaactaattctatattgttatatattttacaattggttatgatatcatgtaataacttggagtctaacgcgcatcgtcgtacgtttatacaattgtgatttagtgtagtatatctacacatgtatttttccgcactatagtattctggactagtgataaaactatcgttatatctgtcttcaatgaactcatcgagatattgctctctgtcatattcatacacctgcataaactttctagacatcttacaatccgtgttattttaggatcatatttacatatttacgggtatatcaaagatgttagattagttaatgggaatcgtctataataatgaatattaaacaattatatgaggacttttaccacaaagcatcataaaaatgagtcgtcgtctgatttatgttttaaatatcaaccgcaaatcaactcataaaatacaagagaatgaaatatatacatattttagtcattgcaatatagaccatacttctacagaacttgattttgtagttaaaaactatgatctaaacagacgacaacctgtaactgggtatactgcactacactgctatttgtataataattactttacaaacgatgtactgaagatattattaaatcatgacgtaaatgtaacgatgaaaaccagtagcggacgtatgcctgtttatatattgcttactagatgttgtaatatttcacatgatgtagtgatagatatgatagacaaagataaaaaccacttattacatagagactattccaacctattactagagtatataaaatctcgttacatgttattgaaggaagaggatatcgatgagaacatagtatccactttattagataagggaatcgatcctaactttaaacaagacggatatacagcgttacattattattatttgtgtctcgcacacgtttataaactaggtgagtgtagaaaaccgataacgataaaaaaggccaagcgaattatttctttgtttatacaacatggagctaatctaaacgcgttagataattgtggtaatacaccattccatttgtatcttagtattgaaatgtgtaataatattcatatgactaaaatgctgttgacttttaatccgaatttcaaaatatgtaataatcatggattaacgcctatactatgttatataacttccgactacatacaacacgatattcttgttatgttaatacatcactatgaaacaaatgttggagaaatgccgatagatgagcgtcgtatgatcgtattcgagtttatcaaaacatattctacacgtccggcagattcgataacttatttgatgaataggtttaaaaatataaatatttatacccgctatgaaggaaagacattattacacgtagcatgtgaatataataatacacaagtaatagattatcttatacgtatcaacggagatataaatgcgttaaccgacaataacaaacacgctacacaactcattatagataacaaagaaaattccccatataccattaattgtttactgtatatacttagatatattgtagataagaatgtgataagatcgttggtggatcaacttccatctctacctatcttcgatataaaatcatttgagaaattcatatcctactgtatacttttagatgacacattttacgataggcacgttaagaatcgcgattctaaaacgtatcgatacgcattttcaaaatacatgtcgtttgataaatacgatggtataataactaaatgtcacgacgaaacaatgttactcaaactgtccactgttctagacactacactatatgcagttttaagatgtcataattcgagaaagttaagaagatacctcaacgagttaaaaaaatataataacgataagtcctttaaaatatattctaatattatgaatgagagataccttaatgtatattataaagatatgtacgtgtcaaaggtatatgataaactatttcctgttttcacagataaaaattgtctactaacattactaccttcagaaattatatacgaaatattatacatgctgacaattaacgatctttataatatatcgtatccacctaccaaagtatagttgtatttttctcatgcgatgtgtgtaaaaaaactgatattatataaatattttagtgccgtataataaagatgacgatgaaaatgatggtacatatatatttcgtatcattattgttattgctattccacagttacgccatagacatcgaaaatgaaatcacagaattcttcaataaaatgagagatactctaccagctaaagactctaaatggttgaatccagcatgtatgttcggaggcacaatgaatgatatagccgctctaggagagccattcagcgcaaagtgtcctcctattgaagacagtcttttatcgcacagatataaagactatgtggttaaatgggagaggctagaaaagaatagacggcgacaggtttctaataaacgtgttaaacatggtgatttatggatagccaactatacatctaaattcagtaaccgtaggtatttgtgcaccgtaactacaaagaatggtgactgtgttcagggtatagttagatctcatattaaaaaacctccttcatgcattccaaaaacatatgaactaggtactcatgataagtatggcatagacttatactgtggaattctttacgcaaaacattataataatataacttggtataaagataataaggaaattaatatcgacgacattaagtattcacaaacgggaaaggaattaattattcataatccagagttagaagatagcggaagatacgactgttacgttcattacgacgacgttagaatcaagaatgatatcgtagtatcaagatgtaaaatacttacggttataccgtcacaagaccacaggtttaaactaatactagatccgaaaatcaacgtaacgataggagaacctgccaatataacatgcactgctgtgtcaacgtcattattgatcgacgatgtactgattgaatgggaaaatccatccggatggcttataggattcgattttgatgtatactctgttttaactagtagaggcggtatcaccgaggcgaccttgtactttgaaaatgttactgaagaatatataggtaatacatataaatgtcgtggacacaactattattttgaaaaaacccttacaactacagtagtattggagtaaatatacaatgcatttttatatacattactgaattattattactgaattattattactgaattattattaattatatcgtatttgtgctatagaatggatgaagatacgcgactatctaggtatttgtatctcaccgatagagaacatataaatgtagactctattaaacagttgtgtaaaatatcagatcctaatgcatgttatagatgtggatgtacggctttacatgagtacttttataattatagatcagtcaacggaaaatacaagtatagatacaacggttactatcaatattattcatctagcgattatgaaaattataatgaatattattatgatagaactggtatgaacagtgagagtgataatatatcaatcaaaacagaatatgaattctatgatgaaacacaagatcaaagtacacaactagtaggttacgacattaaactcaaaaccaatgaggatgattttatggctatgatagatcagtgggtgtccatgattatatagatgaatcaattaataaagtagtatatggaagagagtctcacgtaagatggcgggatatatggcaagaacataatgatggcgtatacagtataggaaaggagtgcatagataatatatacgaagacaaccataccgtagacgaattctacaagatagacagcgtatcagatgtagatgacgcggaacacatatctccgataactaaaaaaccatagaatcagttgatgataatacctacatttctaatcttccgtataccatcaaatacaaaatattcgagcaacaataagtattttttatacctttaaaactgataaataaattttttctagtgatattttggcaagatgagaatcctatttctcatcgctttcatgtatgggtgtgttcactcatatgttaacgcggttgaaaccaaatgtccaaatctagacattgtaacatcttctggagaatttcattgttcaggatgtgtggaacatatgcctgagtttagctatatgtattggttggcaaaggatatgaaatcggacgaggataccaagtttatagaacatctgggtgatggcatcaaagaagatgaaaccgttcgtaccacagatagtggaatcgtcactctacgtaaagtccttcatgtgactgatactaataaatttgataattataggttcacttgtgtcctcgctacgctagatggcatttataaaaagaatgtttgctgaagtagttgtgtgctactatttttatttatgatataatctaatggaattaatttgaattgatatttatccaatactaaagattatattagaatcaaattaatcttttatacgagaaaaaataacgacatacgtcgtcaacaaattaaactttttatttattagttaactagcttatagaacttgctcattgttatgtttctaaaacgggtacggcatataggacaattatccgacgcaccggtttctcttcgtgttctatgccatatattgatgcatgttatgcaaaatatatgagtacacgaatccaataaaccaaagtatctatcgttttgagtaaacaacttcatagcaaattccacattctttttctttacttactctatacacgtcctcgtatttatttagtattttgatgatatccaactcagaaatggttgttgtattattgggtgtatttggagtataggtattattagctatgtaccaatttaccaaccctcttaatattgattgataatcacatcggttatccaattaataactaaattgtagtgtatatatagaccatatatgtttctatttttttgacagttacgtatagtttcagtaagttttgattgttgtattcctgtatctctagataagttagtcatatagtcccttccggcgatacgttttttccaagcccgaaattgattagccaaatgtgtatttatttttgtgatattgatataatatttcggataatgcatactgttagtcttatatcatttggttcatctatgtattgtaatattgttacatgatctatagatgatgtattgattttggcaggatcgaattccatatccgcgactaaacagtgaaaaaaatgtaaatactttttaaattttaaattagtaaaacttttttttattttttatgattccaaaaatactgaatacaaagtcctaaattataaatatggagatcatactaccacaacttattattatgtatacaaggccggtgtaatagatagatatatataattctattacaccggcagacaattaccgaccggtatttgtcgttaccaacataccgtataatatgtaatatacaattccataacccattgacagttgttatacatcaaaattgcaattcttttgattacgatgttataagaatgtagttaattgatgtatgatgttaatgtgtcctctttcctcttataacatcgtaatcaaaaacttttttataatatatacctaataatgtgtcttaatagttctcgtgattcgtcaaacaatcattcttataaaatataataaagcaacgtaaaaacacataaaaataagcgtaactaataagacaatggatatttacgacgataaaggtctacagactattaaactgtttaataatgaatttgattgtataaggaatgacatcagagaattatttaaacatgtaactgattccgatagtatacaacttccgatggaagacaattctgatattatagaaaatatcagaaaaatactatatagacgattaaaaaatgtagaatgtgttgacatcgataacacaataacttttatgaaatacgatccaaatgatgataataagcgtacgtgttctaattgggtacccttaactaataactatatggaatattgtctagtaatatatttggaaacaccgatatgtggaggcaaaataaaattataccaccctacaggaaatataaagtcggataaggatattatgtttgcaaagactctagactttaaatcaacgaaagtgttaactggacgtaaaacaattgccgttctagacatatccgtttcatataatagatcaatgactactattcactacaacgacgacgttgatatagatatacatactgataaaaatggaaaagagttatgttattgttatataacaatagatgatcattacttggttgatgtggaaactataggagttatagtcaatagatctggaaaatgtctgttagtaaataaccatctaggtataggtatcgttaaagataaacgtataagcgatagttttggagatgtatgtatggatacaatatttgacttttctgaagcacgagagttattttcattaactaatgatgataacaggaatatagcatgggacactgataaactagacgatgatacagatatatggactcccgtcacagaagatgattacaaatttctttctagactagtattgtatgcaaaatctcaatcggatactgtatttgactattatgttcttactggtgatacggaaccacccactgtattcattttcaaggtaactagattttactttaatatgccgaaataaaaaatttttgtataatatctagaggtagaggtattgtttagataaatacaaataacatagatacatcgcatacttagcatttttataaatatacataagacatacactttatacatttttgtaaaaatactcataaaaaaatttataaaaattatggcacaaccatatcttgtataggtagtttagttcgtcgagtgaacctataaacagataatagacaacacataataatgcctactaatacaagcataataccgggagatgggatatatgacgttgtagtgtttgggttttctgaacgttgatagtctactaatactacatgctgacatctaatgcctgtataaccatgagagcatctacaatacataccgtcaatatctctagcgtggatacagtcaccgtgtaaacaatatccatctccctctggaccgcataatctgatagctggaatatctgttgtagcgtttgtaatttctggcaatgtcgtttcgatagcgttaccactatcggcgaatgatctgattatcatagcagcgaacaacaacatcagataatttatcaacatttttgatggattctgtgtttatgctgtttctcagtgtgtgtttatgacaagattgggaattttatattattaattcagtaatataaactaataatatattgttaattgtgtaaataatataaaaataacaatacaatattgaatgtgttgctgttaaaaatgtatgtgttaatataatagaataaaataaatgagtatgatcattttagataacgattgattttatcattaccgcttcattcttatattctttgcttacggaacctatatttagaaacatctactaacaattttttatgcttgcattattaatggtatgtaatatgattgattgtgtacgcaataccaatttgttaagtatgaatacggggtacaaacataaattgaaatttaacattatttatttatgatatatatcgttatcgttaggtctataccatggatatctttaaagaactaatcttaaaacaccctgatgaaaatgttttgatttctccagtttccattttatctactttatctattctaaatcatggagcagctggttctacagctgaacaactatcaaaatatatagagaatatgaatgagaatacacccgatgacaataatgatgacatggaggtagatattccgtattgtgcgacactagctaccgcaaataaaatatacggtagcgatagtatcgagttccacgcctccttcctacaaaaaataaaagacgattttcaaactgtaaactttaataatgctaaccaaacaaaggaactaatcaacgaatgggttaagacaatgacaaatggtaaaattaattccttattgactagtccgctatccattaatactcgtatgacagttgttagcgccgtccattttaaagcaatgtggaaatatccattttctaaacatcttacatatacagacaagttttatatttctaagaatatagttaccagcgttgatatgatggtgggtaccgagaataacttgcaatatgtacatattaatgaattattcggaggattctctattatcgatattccatacgagggaaactctagtatggtaattatactaccggacgacatagaaggtatatataacatagaaaaaaatataacagatgaaaaatttaaaaaatggtgtggtatgttatctactaaaagtatagacttgtatatgccaaagtttaaagtggaaatgacagaaccgtataatctggtaccgattttagaaaatttaggacttactaatatattcggatattatgcagattttagcaagatgtgtaatgaaactatcactgtagaaaaatttctacatacgacgtttatagatgttaatgaggagtatacagaagcatcggccgttacaggagtatttacgattaacttttcgatggtatatcgtacgaaggtctacataaaccatccattcatgtacatgattaaagacaccacaggacgtatactttttatagggaaatactgctatccgcaataaatataaacaaatagacttttataaagagtcttcaacgataagtatatcgacatactacttatgctgcgaaagattctgaacgagaacgactatctcaccctcttggatcatatccgcactgctaaatactaaatctccactacactttttatcatcttatgaggaatgattgccttcgtgaaataggaataattagcaccagaatagctatggattattgtggtagagagtgcactattctatgtcgtctactggatgaagatgtgacgtacaaaaaaataaaactagaaattgaaacgtgtcacaacttatcaaaacatatagatagacgaggaaacaatgcgctacattgttacgtctccaataaatgcgatacagacattaagattgttctctcgcggagtcgagagactttgtagaaacaacgaaggattaactccgctaggagtatacagtaagcatagatacgtaaaatctcagattgtgcatctactgatatccagctattcaaattcctctaacgaactcaagtcgaatataaatgatttcgatctgtattcggataatatcgacttacgtctgctaaaatacctaattgtggataaacggatacgtccgtccaagaatacgaattatgcaatcaatggtctcggattggtggatatatacgtaacgacgcctaatccgagaccagaagtattgctatggcttcttaaatcagaatgttacagcaccggttacgtatttcgtacctgtatgtacgacagtgatatgtgtaagaactctcttcattactatatatcgtctcatagagaatctcaatctctatccaaggatgtaattaaatgtttgatcgataacaatgtttccatccatggcagagacgaaggaggatctttacccatccaatactactggtctttctcaaccatagatatagagattgttaaattattattaataaaggatgtggacacgtgtagagtatacgacgtcagccctatattagaggcgtattatctaaacaagcgatttagagtaaccccatataatgtagacatggaaatcgttaatcttcttattgagagacgtcatactcttgtcgacgtaatgcgtagtattacttcgtacgattccagagaatataaccactacatcatcgataacattctaaagagatttagacaacaggatgaatccatcgtacaagccatactgataaactacttacattacggcgatatggtcgttcgatgcatgttagataacggacaacaactatcctctacacgactactttgttaataataatctcgtcgatgtaaacgtcgtaaggtttatcgtggaaaatatggacacgcggctgtaaatcacgtatcgaacaatggccgtctatgtatgtacggtctgatattatcgagatttaataattgcgggtatcactgttatgaaaccatactgatagatgtatttgatatactaagcaagtacatggatgatatagatatgatcgataactctactatattacgcggtcgatgtcaataatatacaatttgcaaagcggttattggaatatggagcgagtatcacgctcgataatcaatacggccatccagaaaagcagttacagaagagaaaacaaaacgaaatcgttgttctacaagatgtctctccctacgacgattactacgtaaaaaagatactagcctactgcctattaagggacgagtcattcgcggaactacatagtaaattctgtttaaacgaggactataaaagtgtatttatgaaaaatatatcattcgataagatagattccatcatcgtgacataagtcgcctcaaagagattcgaatctccgacaccgacctgtatacggtatcacagctatcttaaagccatacattcagacagtcacatttcatttcccatgtacgacgatctcatagaacagtgccatctatcgatggagcgtaaaagtaaactcgtcgacaaagcactcaataaattagagtctaccatcggtcaatctagactatcgtatttgcctccggaaattatgcgcaatatcatctaaacagtatgttgtacggaaagaaccattacaaatattatccatgatagaaagaaaatatctatatgattggagaagtaggaaacaggaacaagacaacgattactacattattaaatcatgaagtccgtattatactcgtatatattgtttctctcatgtataataataaacggaagagatatagcaccgcatgcaccatccgatggaaagtgtaaagacaacgaatacaaacgccataatttgtgtccgggaacatacgcttccagattatgcgatagcaagactaacacacgatgtacgccgtgtggttcgggtaccttcacatctcgcaataatcatttacccgcttgtctaagttgtaacggaagacgcgatcgtgtaacacgactcacaatagaatctgtgaatgctctcccggatattattgtcttctcaaaggatcatccggatgcaaggcatgtgtttcccaaacaaaatgtggaataggatacggagtatccggagacgtcatctgttctccgtgtggtctcggaacatattctcacaccgtctcttccgcagataaatgcgaacccgtacccagaaatacgtttaactatatcgatgtggaaattaacctgtatccagttaacgacacgtcgtgtactcggacgaccactaccggtctcagcgaatccatctcaacgtcggaactaactattactatgaatcataaagactgtaatcccgtatttcgtgatggatacttctccgttcttaataaggtagcgacttcaggtttctttacaggagaaaggtgtgcactctgaatttcgagattaaatgcaataacaaagattcttcctccaaacagttaacgaaagcaaagaatgatactatcatgccgcattcggagacagtaactctagtgggcgacatctatatactatatagtaataccaatactcaagactacgaaactgatacaatctcttatcatgtgggtaatgttctcgatgtcgatagccatatgcccggtagttgcgatatacataaactgatcactaattccaaacccacccactttttatagtaagtttttcacccataaataataaatacaataattaatttctcgtaaaagtagaaaatatattctaatttattgcacggtaaggaagtagaatcataaagaacagtactcaatcaatagcaattatgaaacaatatatcgtcctggcatgcatgtgcctggcggcagctgctatgcctgccagtcttcagcaatcatcctcatcctcctcctcgtgtacggaagaagaaaacaaacatcatatgggaatcgatgttattatcaaagtcacaaagcaagaccaaacaccgaccaatgataagatttgccaatccgtaacggaaattacagagtccgagtcagatccagatcccgaggtggaatcagaagatgattccacatcagtcgaggatgtagatcctcctaccacttattactccatcatcggtggaggtctgagaatgaactttggattcaccaaatgtcctcagattaaatccatctcagaatccgctgatggaaacacagtgaatgctagattgtccagcgtgtccccaggacaaggtaaggactctcccgcgatcactcatgaagaagctcttgctatgatcaaagactgtgaagtgtctatcgacatcagatgtagcgaagaagagaaagacagcgacatcaagacccatccagtactcgggtctaacatctctcataagaaagtgagttacgaagatatcatcggttcaacgatcgtcgatacaaaatgcgtcaagaatctagagtttagcgttcgtatcggagacatgtgcaaggaatcatctgaacttgaggtcaaggatggattcaagtatgtcgacggatcggcatctgaaggtgcaaccgatgatacttcactcatcgattcaacaaaactcaaagcgtgtgtctgaatcgataactctattcatctgaaattggatgagtagggttaatcgaacgattcaggcacaccacgaattaaaaaagtgtaccggacactatattccggtttgcaaaacaaaaatgttcttaactacattcacaaaaagttacctctcgcgacttcttctttttctgtctcaatagtgtgatacgattatgacactattcctattcctattcctatttcctttcagagtatcacaaaaatattaaacctctttctgatggtctcataaaaaaagttttacaaaaatatttttattctctttctctctttgatggtctcataaaaaaagttttacaaaaatatttttattctctttctctctttgatggtctcataaaaaaagttttacaaaaatatttttattctctttctctctttgatggtctcataaaaaaagttttacaaaaatatttttattctctttctctctttgatggtctcataaaaaaagttttacaaaaatatttttattctctttctctctttgatggtctcataaaaaaagttttacaaaaatatttttattctctttctctctttgatggtctcataaaaaaagttttacaaaaatatttttattctctttctctctttgatggtctcataaaaaaagttttacaaaaatatttttattctctttctctctttgatggtctcataaaaaaagttttacaaaaatatttttattctctttctctctttgatggtctcataaaaaaagttttacaaaaatatttttattctctttctctctttgatggtctcataaaaaaagttttacaaaaatatttttattctctttctctctttgatggtctcataaaaaaagttttacaaaaatatttttattctctttctctctttgatggtctcataaaaaagttttacaaaaatatttttattctctttctctctttgatggtctcataaaaaagttttacaaaaatatttttattctctttctctctttgatggtctcataaaaaaagttttacaaaaatatttttattctctttctctctttgatggtctcataa

SEQ ID NO: 4 - DNA, 201471 bp, Artificial Sequence
  GLV-1h189 genome
ttatgagaccatcaaagagagaaagagaataaaaatatttttgtaaaactttttttatgagaccatcaaagagagaaagagaataaaaatatttttgtaaaacttttttatgagaccatcaaagagagaaagagaataaaaatatttttgtaaaacttttttatgagaccatcaaagagagaaagagaataaaaatatttttgtaaaactttttttatgagaccatcaaagagagaaagagaataaaaatatttttgtaaaactttttttatgagaccatcaaagagagaaagagaataaaaatatttttgtaaaactttttttatgagaccatcaaagagagaaagagaataaaaatatttttgtaaaactttttttatgagaccatcaaagagagaaagagaataaaaatatttttgtaaaactttttttatgagaccatcaaagagagaaagagaataaaaatatttttgtaaaactttttttatgagaccatcaaagagagaaagagaataaaaatatttttgtaaaactttttttatgagaccatcaaagagagaaagagaataaaaatatttttgtaaaactttttttatgagaccatcaaagagagaaagagaataaaaatatttttgtaaaactttttttatgagaccatcaaagagagaaagagaataaaaatatttttgtaaaactttttttatgagaccatcaaagagagaaagagaataaaaatatttttgtaaaactttttttatgagaccatcaaagagagaaagagaataaaaatatttttgtaaaactttttttatgagaccatcagaaagaggtttaatatttttgtgatactctgaaaggaaataggaataggaataggaatagtgtcataatcgtatcacactattgagacagaaaaagaagaagtcgcgagaggtaactttttgtgaatgtagttaagaacatttttgttttgcaaaccggaatatagtgtccggtacacttttttaattcgtggtgtgcctgaatcgttcgattaaccctactcatccaatttcagatgaatagagttatcgattcagacacacgctttgagttttgttgaatcgatgagtgaagtatcatcggttgcaccttcagatgccgatccgtcgacatacttgaatccatccttgacctcaagttcagatgattccttgcacatgtctccgatacgaacgctaaactctagattcttgacgcattttgtatcgacgatcgttgaaccgatgatatcttcgtaactcactttcttatgagagatgttagacccgagtactggatgggtcttgatgtcgctgtctttctcttcttcgctacatctgatgtcgatagacacttcacagtctttgatcatagcaagagcttcttcatgagtgatcgcgggagagtccttaccttgtcctggggacacgctggacaatctagcattcactgtgtttccatcagcggattctgagatggatttaatctgaggacatttggtgaatccaaagttcattctcagacctccaccgatgatggagtaataagtggtaggaggatctacatcctcgactgatgtggaatcatcttctgattccacctcgggatctggatctgactcggactctgtaatttccgttacggattggcaaatcttatcattggtcggtgtttggtcttgctttgtgactttgataataacatcgattcccatatgatgtttgttttcttcttccgtacacgaggaggaggatgaggatgattgctgaagactggcaggcatagcagctgccgccaggcacatgcatgccaggacgatatattgtttcataattgctattgattgagtactgttctttatgattctacttccttaccgtgcaataaattagaatatattttctacttttacgagaaattaattattgtatttattatttatgggtgaaaaacttactataaaaagtgggtgggtttggaattagtgatcagtttatgtatatcgcaactaccgggcatatggctatcgacatcgagaacattacccacatgataagagattgtatcagtttcgtagtcttgagtattggtattactatatagtatatagatgtcgcccactagagttactgtctccgaatgcggcatgatagtatcattctttgctttcgttaactgtttggaggaagaatctttgttattgcatttaatctcgaaattcagagtgcacacctttctcctgtaaagaaacctgaagtcgctaccttattaagaacggagaagtatccatcacgaaatacgggattacagtctttatgattcatagtaatagttagttccgacgttgagatggattcgctgagaccggtagtggtcgtccgagtacacgacgtgtcgttaactggatacaggttaatttccacatcgatatagttaaacgtatttctgggtacgggttcgcatttatctgcggaagagacggtgtgagaatatgttccgagaccacacggagaacagatgacgtctccggatactccgtatcctattccacattttgtttgggaaacacatgccttgcatccggatgatcctttgagaagacaataatatccgggagagcattcacagattctattgtgagtcgtgttacacgatcgcgtcttccgttacaacttagacaagcgggtaaatgattattgcgagatgtgaaggtacccgaaccacacggcgtacatcgtgtgttagtcttgctatcgcataatctggaagcgtatgttcccggacacaaattatggcgtttgtattcgttgtctttacactttccatcggatggtgcatgcggtgctatatctcttccgtttattattatacatgagagaaacaatatatacgagtataatacggacttcatgatttaataatgtagtaatcgttgtcttgttcctgtttcctacttctccaatcatatagatattttctttctatcatggataatatttgtaatggttctttccgtacaacatactgtttagatgatattgcgcataatttccggaggcaaatacgatagtctagattgaccgatggtagactctaatttattgagtgctttgtcgacgagtttacttttacgctccatcgatagatggcactgttctatgagatcgtcgtacatgggaaatgaaatgtgactgtctgaatgtatggctttaagatagctgtgataccgtatacaggtcggtgtcggagattcgaatctctttgaggcgacttatgtcacgatgatggaatctatcttatcgaatgatatatttttcataaatacacttttatagtcctcgtttaaacagaatttactatgtagttccgcgaatgactcgtcccttaataggcagtaggctagtatcttttttacgtagtaatcgtcgtagggagagacatcttgtagaacaacgatttcgttttgttttctcttctgtaactgcttttctggatggccgtattgattatcgagcgtgatactcgctccatattccaataaccgctttgcaaattgtatattattgacatcgaccgcgtaatatagtagagttatcgatcatatctatatcatccatgtacttgcttagtatatcaaatacatctatcagtatggtttcataacagtgatacccgcaattattaaatctcgataatatcagaccgtacatacatagacggccattgttcgatacgtgatttacagccgcgtgtccatattttccacgataaaccttacgacgtttacatcgacgagattattattaacaaagtagtcgtgtagaggatagttgttgtccgttatctaacatgcatcgaacgaccatatcgccgtaatgtaagtagtttatcagtatggcttgtacgatggattcatcctgttgtctaaatctctttagaatgttatcgatgatgtagtggttatattctctggaatcgtacgaagtaatactacgcattacgtcgacaagagtatgacgtctctcaataagaagattaacgatttccatgtctacattatatggggttactctaaatcgcttgtttagataatacgcctctaatatagggctgacgtcgtatactctacacgtgtccacatcctttattaataataatttaacaatctctatatctatggttgagaaagaccagtagtattggatgggtaaagatcctccttcgtctctgccatggatggaaacattgttatcgatcaaacatttaattacatccttggatagagattgagattctctatgagacgatatatagtaatgaagagagttcttacacatatcactgtcgtacatacaggtacgaaatacgtaaccggtgctgtaacattctgatttaagaagccatagcaatacttctggtctcggattaggcgtcgttacgtatatatccaccaatccgagaccattgattgcataattcgtattcttggacggacgtatccgtttatccacaattaggtattttagcagacgtaagtcgatattatccgaatacagatcgaaatcatttatattcgacttgagttcgttagaggaatttgaatagctggatatcagtagatgcacaatctgagattttacgtatctatgcttactgtatactcctagcggagttaatccttcgttgtttctacaaagtctctcgactccgcgagagaacaatcttaatgtctgtatcgcatttattggagacgtaacaatgtagcgcattgtttcctcgtctatctatatgttttgataagttgtgacacgtttcaatttctagttttatttttttgtacgtcacatcttcatccagtagacgacatagaatagtgcactctctaccacaataatccatagctattctggtgctaattattcctatttcacgaaggcaatcattcctcataagatgataaaaagtgtagtggagatttagtatttagcagtgcggatatgatccaagagggtgagatagtcgttctcgttcagaatctttcgcagcataagtagtatgtcgatatacttatcgttgaagactctttataaaagtctatttgtttatatttattgcggatagcagtatttccctataaaaagtatacgtcctgtggtgtctttaatcatgtacatgaatggatggtttatgtagaccttcgtacgatataccatcgaaaagttaatcgtaaatactcctgtaacggccgatgcttctgtatactcctcattaacatctataaacgtcgtatgtagaaatttttctacagtgatagtttcattacacatcttgctaaaatctgcataatatccgaatatattagtaagtcctaaattttctaaaatcggtaccagattatacggttctgtcatttccactttaaactttggcatatacaagtctatacttttagtagataacataccacaccattttttaaatttttcatctgttatatttttttctatgttatatataccttctatgtcgtccggtagtataattaccatactagagtttccctcgtatggaatatcgataatagagaatcctccgaataattcattaatatgtacatattgcaagttattctcggtacccaccatcatatcaacgctggtaactatattcttagaaatataaaacttgtctgtatatgtaagatgtttagaaaatggatatttccacattgctttaaaatggacggcgctaacaactgtcatacgagtattaatggatagcggactagtcaataaggaattaattttaccatttgtcattgtcttaacccattcgttgattagttcctttgtttggttagcattattaaagtttacagtttgaaaatcgtcttttattttttgtaggaaggaggcgtggaactcgatactatcgctaccgtatattttatttgcggtagctagtgtcgcacaatacggaatatctacctccatgtcatcattattgtcatcgggtgtattctcattcatattctctatatattttgatagttgttcagctgtagaaccagctgctccatgatttagaatagataaagtagataaaatggaaactggagaaatcaaaacattttcatcagggtgttttaagattagttctttaaagatatccatggtatagacctaacgataacgatatatatcataaataaataatgttaaatttcaatttatgtttgtaccccgtattcatacttaacaaattggtattgcgtacacaatcaatcatattacataccattaataatgcaagcataaaaaattgttagtagatgtttctaaatataggttccgtaagcaaagaatataagaatgaagcggtaatgataaaatcaatcgttatctaaaatgatcatactcatttattttattctattatattaacacatacatttttaacagcaacacattcaatattgtattgttatttttatattatttacacaattaacaatatattattagtttatattactgaattaataatataaaattcccaatcttgtcataaacacacactgagaaacagcataaacacagaatccatcaaaaatgttgataaattatctgatgttgttgttcgctgctatgataatcagatcattcgccgatagtggtaacgctatcgaaacgacattgccagaaattacaaacgctacaacagatattccagctatcagattatgcggtccagagggagatggatattgtttacacggtgactgtatccacgctagagatattgacggtatgtattgtagatgctctcatggttatacaggcattagatgtcagcatgtagtattagtagactatcaacgttcagaaaacccaaacactacaacgtcatatatcccatctcccggtattatgcttgtattagtaggcattattatgtgttgtctattatctgtttataggttcactcgacgaactaaactacctatacaagatatggttgtgccataatttttataaatttttttatgagtatttttacaaaaatgtataaagtgtatgtcttatgtatatttataaaaatgctaagtatgcgatgtatctatgttatttgtatttatctaaacaatacctctacctctagatattatacaaaaattttttatttcggcatattaaagtaaaatctagttaccttgaaaatgaatacagtgggtggttccgtatcaccagtaagaacataatagtcaaatacagtatccgattgagattttgcatacaatactagtctagaaagaaatttgtaatcatcttctgtgacgggagtccatatatctgtatcatcgtctagtttatcagtgtcccatgctatattcctgttatcatcattagttaatgaaaataactctcgtgcttcagaaaagtcaaatattgtatccatacatacatctccaaaactatcgcttatacgtttatctttaacgatacctatacctagatggttatttactaacagacattttccagatctattgactataactcctatagtttccacatcaaccaagtaatgatcatctattgttatataacaataacataactcttttccatttttatcagtatgtatatctatatcaacgtcgtcgttgtagtgaatagtagtcattgatctattatatgaaacggatatgtctagaacggcaattgttttacgtccagttaacactttcgttgatttaaagtctagagtctttgcaaacataatatccttatccgactttatatttcctgtagggtggtataattttattttgcctccacatatcggtgtttccaaatatattactagacaatattccatatagttattagttaagggtacccaattagaacacgtacgcttattatcatcatttggatcgtatttcataaaagttattgtgttatcgatgtcaacacattctacattttttaatcgtctatatagtatttttctgatattttctataatatcagaattgtcttccatcggaagttgtatactatcggaatcagttacatgtttaaataattctctgatgtcattccttatacaatcaaattcattattaaacagtttaatagtctgtagacctttatcgtcgtaaatatccattgtcttattagttacgcttatttttatgtgtttttacgttgctttattatattttataagaatgattgtttgacgaatcacgagaactattaagacacattattaggtatatattataaaaaagtttttgattacgatgttataagaggaaagaggacacattaacatcatacatcaattaactacattcttataacatcgtaatcaaaagaattgcaattttgatgtataacaactgtcaatgggttatggaattgtatattacatattatacggtatgttggtaacgacaaataccggtcggtaattgtctgccggtgtaatagaattatatatatctatctattacaccggccttgtatacataataataagttgtggtagtatgatctccatatttataatttaggactttgtattcagtatttttggaatcataaaaaataaaaaaaagttttactaatttaaaatttaaaaagtatttacatttttttcactgtttagtcgcggatatggaattcgatcctgccaaaatcaatacatcatctatagatcatgtaacaatattacaatacatagatgaaccaaatgatataagactaacagtatgcattatccgaaatattatatcaatatcacaaaaataaatacacatttggctaatcaatttcgggcttggaaaaaacgtatcgccggaagggactatatgactaacttatctagagatacaggaatacaacaatcaaaacttactgaaactatacgtaactgtcaaaaaaatagaaacatatatggtctatatatacactacaatttagttattaattggataaccgatgtgattatcaatcaatattaagagggttggtaaattggtacatagctaataatacctatactccaaatacacccaataatacaacaaccatttctgagttggatatcatcaaaatactaaataaatacgaggacgtgtatagagtaagtaaagaaaaagaatgtggaatttgctatgaagttgtttactcaaaacgatagatactttggtttattggattcgtgtactcatatattttgcataacatgcatcaatatatggcatagaacacgaagagaaaccggtgcgtcggataattgtcctatatgccgtacccgttttagaaacataacaatgagcaagttctataagctagttaactaataaataaaaagtttaatttgttgacgacgtatgtcgttattttttctcgtataaaagattaatttgattctaatataatctttagtattggataaatatcaattcaaattaattccattagattatatcataaataaaaatagtagcacacaactacttcagcaaacattctttttataaatgccatctagcgtagcgaggacacaagtgaacctataattatcaaatttattagtatcagtcacatgaaggactttacgtagagtgacgattccactatctgtggtacgaacggtttcatcttctttgatgccatcacccagatgttctataaacttggtatcctcgtccgatttcatatcctttgccaaccaatacatatagctaaactcaggcatatgttccacacatcctgaacaatgaaattctccagaagatgttacaatgtctagatttggacatttggtttcaaccgcgttaacatatgagtgaacacacccatacatgaaagcgatgagaaataggattctcatcttgccaaaatatcactagaaaaaatttatttatcagttttaaaggtataaaaaatacttattgttgctcgaatattttgtatttgatggtatacggaagattagaaatgtaggtattatcatcaactgattctatggttttatgtattctatcatgtttcactattgcgttggaaataatatcatatgcttccacatatattttattttgttttaactcataatactcacgtaattctggattattggcatatctatgaataattttagctccatgatcagtaaatattaatgagaacatagtattaccacctaccattatttttttcatctcattcaattcttaattgcaaagatctatataatcattatagcgttgacttatggactctggaatcttagacgatgtacagtcatctataatcatggcatatttaatacattgttttatagcatagtcgttatctacgatgttagatatttctctcaatgaatcaatcacacaatctaatgtaggtttatgacataatagcattttcagcagttcaatgtttttagattcgttgatggcaatggctatacatgtatatccgttatttgatctaatgttgacatctgaaccggattctagcagtaaagatactagagattgtttattatatctaacagccttgtgaagaagtgtttctcctcgtttgtcaatcatgttaatgtctttaagataaggtaggcaaatgtttatagtactaagaattgggcaagcataagacatgtcacaaagacccttttttgtatgtataagtgtaaaaattataacatccatagttggatttacataggtgtccaatcgggatctctccatcatcgagataattgatggcatctcccttccttttttagtagatatttcatcgtgtaagaatcaatattaatatttctaaagtatccgtgtatagcctctttatttaccacagctccatattccactagagggatatcgccgaatgtcatatactcaattagtatatgttggaggacatccgagttcattgttttcaatatcaaagagatggtttccttatcatttctccatagtggtacaatactacacattattccgtgcggctttccattttccaaaaacaatttgaccaaatctaaatctacatctttattgtatctataatcactatttagataatcagccataattcctcgagtgcaacatgttagatcgtctatatatgaataagcagtgttatctattcctttcattaacaatttaacgatgtctatatctatatgagatgacttaatataatattgaagagctgtacaatagtttttatctataaaagacggcttgattccgtgattaattagacatttaacaacttccggacgcacatatgctctcgtatccgactctgaatacagatgagagatgatatacagatgcaatacggtaccgcaatttcgtagttgataatcatcatacgcgtatcagtactcgtcctcataaagaacactgcagccattttctatgaacaaatcaataattttagaaacaggatcattgtcattacataattttctataactgaacgatggttttcacatttaacactcaagtcaaatccatgttctaccaacacctttatcaagtcaacgtctacatttttggatttcatatagctgaatatattaaagttatttatgttgctaaatccagtggcttctagtagagccatcgctatatccttattaactttaacatgtctactatttgtgtattcttctaatggggtaagctgtctccaatttttgcgtaatggattagtgccactgtctagtagtagtttgacgacctcgacattattacaatgctcattaaaaaggtatgcgtgtaaagcattattcttgaattggttcctggtatcattaggatctctgtctttcaacatctgtttaagttcatcaagagccacctcctcattttccaaatagtcaaacattttgactgaatgagctactgtgaactctatacacccacacaactaatgtcattaaatatcatgtcaaaaacttgtacaattattaataaaaataatttagtgtttaaattttaccagttccagattttacacctccgttaatacctccattaaccccactggacgatcctcctccccacattccaccgccaccagatgtataagttttagatcctttattactaccatcatgtccatggataaagacactccacatgccgccactaccccctttagaagacatattaataagacttaaggacaagtttaacaataaaattaatcacgagtaccctactaccaacctacactattatatgattatagtttctatttttacagtaccttgactaaagtttctagtcacaagagcaatactaccaacctacactattatatgattatagtttctatttttataggaacgcgtacgagaaaatcaaatgtctaatttctaacggtagtgttgataaacgattgttatccgcggatacctcctctatcatgtcgtctattttcttactttgttctattaacttattagcattatatattatttgattataaaacttatattgcttattagcccaatctgtaaatatcggattattaacatatcgtttctttgtaggtttatttaacatgtacatcactgtaagcatgtccttaccatttattttaatttgacgcatatccgcaatttctttttcgcagtcggttataaattctatatatgatggatacatgctacatgtgtacttataatcgactaatatgaagtacttgatacatattttcagtaacgatttattattaccacctatgaataagtacctgtgatcgtctaggtaatcaactgttttcttaatacattcgatggttggtaatttactcagaataatttccaatatcttaatatataattctgctatttctgggatatatttatctgccagtataacacaaatagtaatacatgtaaacccatattttgttattatattaatgtctgcgccattatctattaaccattctactaggctgacactatgcgactcaatacaatgataaagtatactacatccatgtttatctattttgtttatatcatcaatatacggcttacaaagttttagtatcgataacacatccaactcacgcatagagaaggtagggaataatggcataatatttattaggttatcatcattgtcattatctacaactaagtttccattttttaaaatatactcgacaactttaggatctctattgccaaatttttgaaaatatttatttatatgcttaaatctatataatgtagctccttcatcaatcatacatttaataacattgatgtatactgtatgataagatacatattctaacaatagatcttgtatagaatctgtatatcttttaagaattgtggatattaggatattattacataaactattacacaattctaaaatataaaacgtatcacggtcgaataatagttgatcaactatataattatcgattttgtgatttttcttcctaaactgtttacgtaaatagttagatagaatattcattagttcatgaccactatagttactatcgaataacgcgtcaaatatttcccgtttaatatcgcatttgtcaagataataatagagtgtggtatgttcacgataagtataataacgcatctctttttcgtgtgaaattaaatagtttattacgtccaaagatgtagcataaccatcttgtgacctagtaataatataataatagagaactgttttacccattctatcatcataatcagtggtgtagtcgtaatcgtaatcgtctaattcatcatcccaattataatattcaccagcacgtctaatctgttctattttgatcttgtatccatactgtatgttgctacatgtaggtattcctttatccaataatagtttaaacacatctacattgggatttgatgttgtagcgtatttttctacaatattaataccatttttgatactatttatttctatacctttcgaaattagtaatttcaataagtctatattgatgttatcagaacatagatattcgaatatatcaaaatcattgatatttttatagtcgactgacgacaataacaaaatcacaacatcgtttttgatattattatttttcttggtaacgtatgcctttaatggagtttcaccatcatactcatataatggatttgcaccactttctatcaatgattgtgcactgctggcatcgatgttaaatgttttacaactatcatagagtatcttatcgttaaccatgattggttgttgatgctatcgcattttttggtttctttcatttcagttatgtatggatttagcacgtttgggaagcatgagctcatatgatttcagtactgtagtgtcagtactattagtttcaataagatcaatctctagatctatagaatcaaaacacgataggtcagaagataatgaatatctgtaggcttcttgttgtactgtaacttctggttttgttagatggttgcatcgtgctttaacgtcaatggtacaaattttatcctcgctttgtgtatcatattcgtccctactataaaattgtatattcagattatcatgcgatgtgtatacgctaacggtatcaataaacggagcacaccatttagtcataaccgtaatccaaaaatttttaaagtatatcttaacgaaagaagttgtgtcattgtctacggtgtatggtactagatcctcataagtgtatatatctagagtaatgtttaatttattaaatggttgataatatggatcctcgtgacaatttccgaagatggaaataagacataaacacgcaataaatctaattgcggacatggttactccttaaaaaaatacgaataatcaccttggctatttagtaagtgtcatttaacactatactcatattaatccatggactcataatctctatacgggattaacggatgttctatatacggggatgagtagttctcttctttaactttatactttttactaatcatatttagactgatgtatgggtaatagtgtttgaagagctcgttctcatcatcagaataaatcaatatctctgtttttttgttatacagatgtattacagcctcatatattacgtaatagaacgtgtcatctaccttattaactttcaccgcatagttgtttgcaaatacggttaatcctttgacctcgtcgatttccgaccaatctgggcgtataatgaatctaaactttaattgcttgtaatcattcgaaataatttttagtttgcatccgtagttatcccctttatgtaactgtaaatttctcaacgcgatatctccattaataatgatgtcgaattcgtgctgtatacccatactgaatggatgaacgaataccgacggcgttaatagtaatttactttttcatctttacatattgggtactagttttactatcataagtttataaattccacaagctactatggaataagccaaccatcttagtataccacacatgtcttaaagtttattaattaattacatgttgttttatatatatcgctacgaatttaaagagaaattagtttaggaagaaaaattatctatctacatcatcacgtctctgtattctacgatagagtgctactttaagatgcgacagatccgtgtcatcaaatatatactccattaaaatgattattccggcagcgaacttgatattggatatatcacaacctttgttaatatctacgacaatagacagcagtcccatggttccataaacagtgagtttatctttctttgaagagatattttgtagagatcttataaaactgtcgaatgacatcgcatttatatctttagctaaatcgtatatgttaccatcgtaatatctaaccgcgtctatcttaaacgtttccatcgctttaaagacgtttccgatagatggtctcatttcatcagtcatactgagccaacaaatataatcgtgtataacatctttgatagaatcagactctaaagaaaacgaatcggctttattatacgcattcatgataaacttaatgaaaaatgtttttcgttgtttaagttggatgaatagtatgtcttaataattgttattatttcattaattaatatttagtaacgagtacactctataaaaacgagaatgacataactaatcataactagttatcaaagtgtctaggacgcgtaattttcatatggtatagatcctgtaagcattgtctgtattctggagctattttctctatcgcattagtgagttcagaatatgttataaatttaaatcgaataacgaacataactttagtaaagtcgtctatattaactcttttattttctagccatcgtaataccatgtttaagatagtatattctctagttactacgatctcatcgttgtctagaatatcacatactgaatctacatccaattttagaaattggtctgtgttacatatctcttctatattattgttgatgtattgtcgtagaaaactattacgtagaccattttctttataaaacgaatatatagtactccaattatctttaccgatatatttgcacacataatccattctctcaatcactacatctttaagattttcgttgttaagatatttggctaaactatataattctattagatcatcaacagaatcagtatatatttttctagatccaaagacgaactctttggcgtcctctataatattcccagaaaagatattttcgtgttttagtttatcgagatctgatctgttcatatacgccatgattgtacggtacgttatgataaccgcataaaataaaaatccattttcatttttaaccaatactattcataattgagattgatgtaatactttgttactttgaacgtaaagacagtacacggatccgtatctccaacaagcacgtagtaatcaaatttggtgttgttaaacttcgcaatattcatcaatttagatagaaacttatactcatcatctgttttaggaatccatgtattattaccactttccaacttatcattatcccaggctatgtttcgtccatcatcgttgcgcagagtgaataattcttttgtattcggtagttcaaatatatgatccatgcatagatcggcaaagctattgtagatgtgatttttcctaaatctaatataaaactcgtttactagcaaacactttcctgatttatcgaccaagacacatatggtttctaaatctatcaagtggtggggatccatagttatgacgcagtaacatatattattacattcttgactgtcgctaatatctaaatatttattgttatcgtattggattctgcatatagatggcttgtatgtcaaagatatagaacacataaccaatttatagtcgcgctttacattctcgaatctaaagttaagagatttagaaaacattatatcctcggatgatgttatcactgtttctggagtaggatatattaaagtctttacagatttcgtccgattcaaataaatcactaaataatatcccacattatcatctgttagagtagtatcattaaatctattatattttatgaaagatatatcactgctcacctctatatttcgtacatttttaaactgtttgtataatatctctctgatacaatcagatatatctattgtgtcggtagacgataccgttacatttgaattaatggtgttccattttacaacttttaacaagttgaccaattcatttctaatagtatcaaactctccatgattaaatattttaatagtatccattttatatcactacggacacaaagtagctgacataaaccattgtataatttttatgttttatgtttattagcgtacacattttggaagttccggcttccatgtatttcctggagagcaagtagatgatgaggaaccagatagtttatatccgtacttgcacttaaagtctacattgtcgttgtatgagtatgatcttttaaacccgctagacaagtatccgtttgatattgtaggatgtggacatttaacaatctgacacgtgggtggatcggaccattctcctcctgaacacaggacactagagttaccaatcaacgaatatccactattgcaactataagttacaacgctcccatcggtataaaaatcctcgtatccgttatgtcttccgttggatatagatggaggggattggcatttaacagattcacaaataggtgcctcgggattccataccatagatccagtagatcctaattcacaatacgatttagattcaccgatcaactgatatccgctattacaagagtacgttatactagagccaaagtctactccaccaatatcaagttggccattatcgatatctcgaggcgatgggcatctccgtttaatacattgattaaagagtgtccatccagtacctgtacatttagcatatataggtcccattttttgctttctgtatccaggtagacatagatattctatagtgtctcctatgttgtaattagcattagcatcagtctccacactattcttaaatttcatattaatgggtcgtgacggaatagtacagcatgatagaacgcatcctattcccaacaatgtcaggaacgtcacgctctccaccttcatatttatttatccgtaaaaatgttatcctggacatcgtacaaataataaaaagcccatatatgttcgctattgtagaaattgtttttcacagttgctcaaaaacgatggcagtgacttatgagttacgttacactttggagtctcatctttagtaaacatatcataatattcgatattacgagttgacatatcgaacaaattccaagtatttgattttggataatattcgtattttgcatctgctataattaagatataatcaccgcaagaacacacgaacatctttcctacatggttaaagtacatgtacaattctatccatttgtcttccttaactatatatttgtatagataattacgagtctcgtgagtaattccagtaattacatagatgtcgccgtcgtactctacagcataaactatactatgatgtctaggcatgggagacttttttatccaacgatttttagtgaaacattccacatcgtttaatactacatatttctcatacgtggtataaactccacccattacatatatatcatcgtttacgaataccgacgcgcctgaatatctaggagtaattaagtttggaagtcttatccatttcgaagtgccgtgtttcaaatattctgccacacccgttgaaatagaaaattctaatcctcctattacatataactttccatcgttaacacaagtactaacttctgattttaacgacgacatattagtaaccgttttccattttttcgttttaagatctacccgcgatacggaataaacatgtctattgttaatcatgccgccaataatgtatagacaattatgtaaaacatttgcattatagaattgtctatctgtattaccgactatcgtccaatattctgttctaggagagtaatgggttattgtggatatataatcagagtttttaatgactactatattatgttttataccatttcgtgtcactggctttgtagatttggatatagttaatcccaacaatgatatagcattgcgcatagtattagtcataaacttgggatgtaaaatgttgatgatatctacatcgtttggatttttatgtatccactttaataatatcatagctgtaacatcctcatgatttacgttaacgtcttcgtgggataagatagttgtcagttcatcctttgataattttccaaattctggatcggatgtcaccgcagtaatattgttgattatttctgacatcgacgcattatatagttttttaattccatatcttttagaaaagttaaacatccttatacaatttgtgaaattaatattatgaatcatagtttttacacatagatctactacaggcggaacatcaattattatggcagcaactagtatcatttctacattgtttatggtgatgtttatcttcttccagcgcatatagtctaatagcgattcaaacgcgtgatagtttataccattcaatataatcgcttcatcctttagatggtgatcctgaatgcgtttaaaaaaattatacggagacgccgtaataatttccttattcacttgtataatttccccattgatagaaaatattacgctttccattcttaaagtactataagtaattatagtataatgtaaacgtttatatattcaatatttttataaaaatcattttgacattaattcctttttaaatttccgtctatcatctatagaaacgtattctatgaatttataaaatgcttttacgtgtcctatcgtaggcgatagaaccgctaaaaagcctatcgaatttctacaaaagaatctgttatatggtatagggagagtataaaacattaaatgtccgtacttattaaagtattcagtagccaatcctaactctttcgaatacttattaatggctcttgttctgtacgaatctatttttttgaacaacggacctagtggtatatcttgttctatgtatctaaaataatgtctgactagatccgttagtttaatatccgcagtcatcttgtctagaatggcaaatctaactgcgggtttaggctttagtttagtttctatatctacatctatgtctttatctaacaccaaaaatataatagctaatattttattacaatcatccggatattcttctacgatctcactaactaatgtttctttggttatactagtatagtcactatcggacaaataaagaaaatcagatgatcgatgaataatacatttaaattcatcatctgtaagatttttgagatgtctcattagaatattattagggttagtactcattatcattcggcagctattacttattttattatttttcaccatatagatcaatcattagatcatcaaaatatgtttcaatcatcctaaagagtatggtgaatgactcttcccatctaatttctgaacgttcaccaatgtctctagccactttggcactaatagcgatcattcgcttagcgtcttctatattattaactggttgatttaatctatctagcaatggaccgtcggacagcgtcattctcatgttcttaatcaatgtacatacatcgccgtcatctaccaattcatccaacaacataagctttttaaaatcatcattataataggtttgatcgttgtcatttctccaaagaatatatctaataagtagagtcctcatgcttagttaacaactattttttatgttaaatcaattagtacaccgctatgtttaatacttattcatattttagtttttaggattgagaatcaatacaaaaattaatgcatcattaattttagaaatacttagtttccacgtagtcaatgaaacatttgaactcatcgtacaggacgttctcgtacaggacgtaactataaaccggtttatatttgttcaagatagatacaaatccgataactttttttacgaattctacgggatccactttaaaagtgtcataccgggttctttttatttttttaaacagatcaatggtgtgatgttgattaggtcttttacgaatttgatatagaatagcgtttacatattctccataatggtcaatcgccatttgttcgtatgtcataaattctttaattatatgacactgtgtattatttagttcatccttgttcattgttaggaatctatccaaaatggcaattatactagaactataggtgcgttgtatacacatattgatgtgtctgtttatacaatccatgatatttggatccatgctactaccttcgggtaaaattgtagcatcatataccatttctagtactttaggttcattattatccattgcagaggacgtcatgatcgaatcataaaaaaatatattatttttatgttattttgttaaaaataatcatcgaatacttcgtaagatactccttcatgaacataatcagttacaaaacgtttatatgaagtaaagtatctacgatttttacaaaagtccggatgcataagtacaaagtacgcgataaacggaataataatagatttatctagtctatctttttctatagctttcatagttagatacatggtctcagaagtaggattatgtaacatcagcttcgataaaatgactgggttatttagtcttacacattcgctcatacatgtatgaccgttaactacagagtctacactaaaatgattgaacaatagatagtctaccattgtttcgtattcagatagtacagcgtagtacatggcatcttcacaaattatatcattgtctaatagatatttgacgcatcttatggatcccacttcaacagccatcttaaaatcatattgctttcctttatcattaataatttctagaacatcatctctatcataaaagatacaaatattaactgtttgatccgtaataacattgctagtcaatagcaatttgttaataagatgcgctgggctcaatgtcttaataagaagtgtaagaggactatctccgaatttgttttgtttattaacatccgttgatggaagtaaaagatctataatgtctacattcttgactgttttagagcatacaatatggagaggtgtatttccatcatgatctggttttgagggactaattcctagtttcatcatccatgagattgtagaagcttttggattgtctgacataagatgtctatgaatatgatttttgccaaatttatccactatcctggcttcgaatccgatggacattatttttttaaacactctttctgaaggatctgtacacgccaacaacggaccacatccttcttcatcaaccgagttgttaatcttggctccatactgtaccaataaatttattctctctatgacttcatcatctgttcccgagagataatatagaggtgttttatgctgtttatcacacgcgtttggatctgcgccgtgcgtcagcagcatcgcgactattctattattattaattttagaagctatatgcaatggataatttccatcatcatccgtctcatttggagagtatcctctatgaagaagttcttcgacaaatcgttcatctagtcctttaattccacaatacgcatgtagaatgtgataattatttccagaaggttcgatagcttgtagcatattcctaaatacatctaaatttttactattatatttggcataaagagatagataatactcggccgacataatgttgtccattgtagtataaaaattaatatttctatttctatttctgtatatttgcaacaatttactctctataacaaatatcataacttagtttttttatgtcaagaaggcactggtttagttcatctataaatgtcacgccataactaccacgcatgccatactcagaattatgataaagatatttatccttggggtgtaggtaatggggattaatctttgttggatcagtctctaagttaacacatgtcacacatgatccatttatagttatatcacacgatgatgatttatgaattgattccggaagatcgctatcgtattttgtggttccacaattcatttccatacatgttattgtcacactaatattatgatgaactttatctagccgctgagtggtaaacaacagaacagatagtttattatctttaccaacaccctcagccgctgccacaaatctctgatccgtatccatgatggtcatgtttatttctagtccgtatccagtcaacactatgttagcatttctgtcgatatagctttcactcatatgacactcaccaataatagtagaattaatgtcgtaatttacaccaatagtgagttcggcggcaaagtaccaataccggtaatcttgtcgaggaggacatatagtattcttgtattctaccgaatacccgagagatgcgatacaaaagagcaagactaatttgtaaaccatcttactcaaaatatgtaacaatagtacgatgcaatgagtaagacaataggaaatctatcttatatacacataattattctatcaattttaccaattagttagtgtaatgttaacaaaaatgtgggagaatctaattagtttttctttacacaattgacgtacatgagtctgagttccttgtttttgctaattatttcatccaatttattattcttgacgatatcgagatcttttgtataggagtcaaacttgtattcaacatgcttttctataatcattttagctatttcggcatcatccaatagtacattttccagattagcagaatagatattaatgtcgtatttgaacagagcctgtaacatctcaatgtctttattatctatagccaatttaatgtccggaatgaagagaagggaattattggtgtttgtcgacgtcatatagtcgagcaagagaatcatcatatccacgtgtccattttttatagtgatgtgaatacaactaaggagaatagccagatcaaaagtagatggtatctctgaaagaaagtaggaaacaatacttacatcattaagcatgacggcatgataaaatgaagttttccatccagttttcccatagaacatcagtctccaatttttcttaacaaacagttttaccgtttgcatgttaccactatcaaccgcataatacaatgcggtgtttcccttgtcatcaaattgtgaatcatccagtccactgaatagcaaaatctttactattttggtatcttccaatgtggctgcctgatgtaatggaaattcattctctagaagatttttcaatgctccagcgttcaacaacgtacatactagacgcacgttattatcagctattgcataatacaaggcactatgtccatggacatccgccttaaatgtatctttactagagagaaagcttttcagctgcttagacttccaagtattaattcgtgacagatccatgtctgaaacgagacgctaattagtgtatattttttcattttttataattttgtcatattgcaccagaattaataatatctttaatagatctgattagtagatacatggctatcgcaaaacaacatatacacatttaataaaaataatatttattaagaaaattcagatttcacgtacccatcaatataaataaaataatgattccttacaccgtacccatattaaggagattccaccttacccataaacaatataaatccagtaatatcatgtctgatgatgaacacaaatggtgtattaaattccagtttttcaggagatgatctcgccgtagctaccataatagtagatgcctctgctacagttccttgttcgtcgacatctatctttgcattctgaaacattttataaatatataatgggtccctagtcatatgtttaaacgacgcattatctggattaaacatactaggagccatcatttcggctatcgacttaatatccctcttattttcgatagaaaatttagggagtttaagattgtacactttattccctaattgagacgaccaatagtctaattttgcagccgtgatagaatctgtgaaatgggtcatattatcacctattgccaggtacatactaatattagcatccttatacggaaggcgtaccatgtcatattctttgtcatcgattgtgattgtatttccttgcaatttagtaactacgttcatcatgggaaccgttttcgtaccgtacttattagtaaaactagcattgcgtgttttagtgatatcaaacggatattgccatatacctttaaaatatatagtattaatgattgcccatagagtattattgtcgagcatattagaatctactacattagacataccggatctacgttctactatagaattaattttattaaccgcatctcgtctaaagtttaatctatataggccgaatctatgatattgttgataatacgacggtttaatgcacacagtattatctacgaaactttgataagttagatcagtgtacgtatatttagatgttttcagcttagctaatcctgatattaattctgtaaatgctggacccagatctctttttctcaaatccatagtcttcaataattctattctagtattacctgatgcaggcaatagcgacataaacatagaaaacgaataaccaaacggtgagaagacaatattatcatcttgaatatttttatacgctactataccggcattggtaaatccttgtagacgataggcggacgctgaacacgctaacgatagtatcaataacgcaatcatgattttatggtattaataattaaccttatttttatgttcggtataaaaaaattattgatgtctacacatccttttgtaattgacatctatatatccttttgtataatcaactctaatcactttaacttttacagttttccctaccagtttatccctatattcaacatatctatccatatgcatcttaacactctctgccaagatagcttcagagtgaggatagtcaaaaagataaatatatagagcataatcattctcgtatactctgccctttattacatcacccgcattgggcaacgaataacaaaatgcaagcatcttgttaacgggctcgtaaattgggataaaaattatgtttttattgtcttatatctattttattcaagagaatattcaggaatttctttttccggttgtatctcgtcgcagtatatatcatttgtacattgtttcatattttttaatagtttacaccttttagtaggactagtatcgtacaattcatagctgtattttgaattccaatcacgcataaaaatatcttccaattgttgacgaagacctaatccatcatccggtgtaatattaatagatgctccacatgtatccgtaaagtaatttcctgtccaatttgaggtacctatataggccgttttatcggttaccatatatttggcatggtttaccctagaatacggaatgggaggatcagcatctggtacaataaatagctttacttctatatttatgtttttagattttagcatagcgatagatcttaaaaagtttctcatgataaacgaagatcgttgccagcaactaatcaatagcttaacggatacttgtctgtctatagcggatcttcttaattcatcttctatataaggccaaaacaaaattttacccgccttcgaataaataatagggataaagttcataacagatacataaacgaatttactcgcatttctaatacatgacaataaagcggttaaatcattggttctttccatagtacatagttgttgcggtgcagaagcaataaatacagagtgtggaacgccgcttacgttaatactaagaggatgatctgtattataatacgacggataaaagtttttccaattatatggtagattgttaactccaagataccagtatacctcaaaaatttgagtgagatccgctgccaagttcctattattgaagatcgcaatacccaattccttgacctgagttagtgatctccaatccatgttagcgcttcctaaataaatatgtgtattatcagatatccaaaattttgtatgaagaactcctcctaggatatttgtaatatctatgtatcgtacttcaactccggccatttgtagtctttcaacatcctttaatggtttgttagatttattaacggctactctaactcgtactcctcttttgggtaattgtacaatctcgtttaatattatcgtgccgaaattcgtacccacttcatccgataaactccaataaaaagatgatatatctagtgtttttgtggtattggatagaatttccctccacatgttaaatgtagacaaatatactttatcaaattgcatacctataggaatagtttctgtaatcactgcgattgtattatccggattcattttatttgttaaaagaataatcctatatcacttcactctattaaaaatccaagtttctatttctttcatgactgattttttaacttcatccgtttccttatgaagatgatgtttggcaccttcataaatttttatttctctattacaatttgcatgttgcatgaaataatatgcacctaaaacatcgctaatcttattgtttgttccctggagtatgagagtcggggggtgttaatcttggaaattatttttctaaccttgttggtagccttcaagacctgactagcaaatccagccttaattttttcatgattgactaatgggtcgtattggtatttataaactttatccatatctctagatactgattctggacatagctttccgactggcgcatttggtgtgatggttcccataagtttggcagctagcagattcagtcttgaaacagcatctgcattaactagaggagacattagaatcattgctgtaaacaagtttggattatcgtaagaggctagctcccatggaatgacccaataagtagatttaatagttaccacgtgctgtaccaaagtcatcaatcatcattttttcaccattacttcttccatgtccaatatgatcatgtgagaatactaaaattcctaacgatgatatgttttcagctagttcgtcataacgtccagaatgtttaccagctccatgacttatgaatactaatgccttaggatatgtaataggtttccaatatttacaatatatgtaatcattgtccagattgaacatacagtttgcactcatgattcacgttatataactatcaatattaacagttcgtttgatgatcatattatttttatgttttattgataattgtaaaaacatacaattaaatcaatatagaggaaggagacggctactgtcttttgtaagatagtcatggcgactaaattagattatgaggatgctgttttttactttgtggatgatgataaaatatgtagtcgcgactccatcatcgatctaatagatgaatatattacgtggagaaatcatgttatagtgtttaacaaagatattaccagttgtggaagactgtacaaggaattgatgaagttcgatgatgtcgctatacggtactatggtattgataaaattaatgagattgtcgaagctatgagcgaaggagaccactacatcaattttacaaaagtccatgatcaggaaagtttattcgctaccataggaatatgtgctaaaatcactgaacattggggatacaaaaagatttcagaatctagattccaatcattgggaaacattacagatttgatgaccgacgataatataaacatcttgatactttttctagaaaaaaaattgaattgatgatataggggtcttcataacgcataattattacgttagcattctatatccgtgttaaaaaaaattatcctatcatgtatttgagagttttatatgtagcaaacatgatagctgtgatgccaataagctttagatattcacgcgtgctagtgttagggatggtattatctggtggtgaaatgtccgttatataatctacaaaacaatcatcgcatatagtatgcgatagtagagtaaacatttttatagtttttactggattcatacatcgtctacccaattcggttataaatgaaattgtcgccaatcttacacccaaccccttgttatccattagcatagtattaacttcgttatttatgtcataaactgtaaatgattttgtagatgccatatcatacatgatattcatgtccctattataatcattactaactttatcacaatatatgttgataatatctatatatgatctagtctttgtgggcaactgtctatacaagtcgtctaaacgttgtttactcatatagtatcgaacagccatcattacatggtcccgttccgttgatagataatcgagtatgttagtggacttgtcaaatctatataccatattttctggaagtggatatacatagtcgtgatcaacattattgctagcctcatcttctatatcctgtactataccattatctatatcatctacataatctatgatattattacacataaacatcgacaacatactattgtttattatctaagtcctgttgatccaaacccttgatctcctctatttgtactatctagagattgtacttcttccagttctggataatatatacgttgatagattagctgagctattctatctccagtatttacattaaacgtacattttccattattaataagaatgactcctatgtttcccctataatcttcgtctattacaccacctcctatatcaatgccttttagtgacagaccagacctaggagctattctaccatagcagaacttaggcatggacatactaatatctgtcttaattaactgtctttctcctggagggatagtataatcgtaagcgctatacaaatcatatccggcagcacccggcgattgcctagtaggagatttagctctgttagtttccttaacaaatctaactggtgagttaatattcatgttgaacataaaactaatattttatttcaaaattatttaccatcccatatattccatgaataagtgtgatgattgtacacttctatagtatctatatacgatccacgataaaatcctcctatcaatagcagtttattatccactatgatcaattctggattatccctcggataaataggatcatctatcagagtccatgtattgctggattcacaataaaattccgcatttctaccaaccaagaataaccttctaccgaacactaacgcgcatgatttataatgaggataataagtggatggtccaaactgccactgatcatgattgggtagcaaatattctgtagttgtatcagtttcagaatgtcctcccattacgtatataacattgtttatggatgccactgctggattacatctaggtttcagaagactcggcatattaacccaagcagcatccccgtggaaccaacgctcaacagatgtgggatttggtagacctcctactacgtataatttattgttagcgggtatcccgctagcatacagtctggggctattcatcggaggaattggaatccaattgtttgatatataatttacagctatagcattgttatgtatttcattgttcatccatccaccgatgagatatactacttctccaacatgagtacttgtacacatatggaatatatctataatttgatccatgttcataggatactctatgaatggatacttgtatgatttgcgtggttgtttatcacaatgaaatattttggtacagtctagtatccattttacattatttatacctctgggagaaagataatttgacctgattacatttttgataaggagtagcagatttcctaatttatttcttcgcctcatataccacttaatgacaaaatcaactacataatcctcatctggaacatttagttcatcgctttctagaataagtttcatagatagataatcaaaattgtctatgatgtcatcttccagttccaaaaagtgtttggcaataaagtttttagtatgacataagagattggatagtccgtattctatacccatcatgtaacactcgacacaatattcctttctaaaatctcgtaagataaagtttatacaagtgtagatgataaattctacagaggttaatatagaagcacgtaataaattgacgacgttatgactatctatatatacctttccagtatatgagtaaataactatagaagttaaactgtgaatgtcaaggtctagacaaacccttgtaactggatctttatttttcgtgtatttttgacgtaaatgtgtgcgaaagtaaggagataactttttcaatatcgtagaattgactattatattgcctcctatggcatcaataattgttttgaatttcttagtcatagacaatgctaatatattcttacagtacacagtattgacaaatatcggcatttatgtttctttaaaagtcaacatctagagaaaaatgattatctttttgagacataactcccattttttggtattcacccacacgtttttcgaaaaaattagtttttccttccaatgatatattttccatgaaatcaaacggattggtaacattataaatttttttaaatcccaattcagaaatcaatctatccgcgacgaattctatatatgttttcatcatttcacaattcattcctataagtttaactggaagagccgcagtaagaaattcttgttcaatggatactgcatctgttataatagatctaacggtttcttcactcggtggatgcaataaatgtttaaacatcaaacatgcgaaatcgcagtgcagaccctcgtctctactaattagttcgttggaaaacgtgagtccgggcattaggccacgctttttaagccaaaatatggaagcgaatgatccagaaaagaaaattccttctactgcagcaaaggcaataagtctctctccataaccggcgctgtcatgtatccacttttgagcccaatcggccttcttttttacacaaggcatcgtttctatggcattaaagagatagtttttttcattactatctttaacataagtatcgatcaaaagactatacatttccgaatgaatgttttcaatggccatctgaaatccgtagaaacatctagcctcggtaatctgtacttctgtacaaaatcgttccgccaaattttcattcactattccgtcactggctgcaaaaaacgccaatacatgttttataaaatatttttcgtctggtgttagtttattccaatcattgatatctttagatatatctacttcttccactgtccaaaatgatgcctctgcctttttatacatgttccagatgtcatgatattggattgggaaaataacaaatctatttggatttggtgcaaggatgggttccataactaaattaacaataacaataaattttttttcagttatctatatgcctgtacttggattttttgtacatcgatatcgccgcaatcactacaataattacaagtattattgatagcattgttattagtactatcataattaaattatctacattcatgggtgctgaataatcgttattatcatcattatcattttgtaattgtgacatcatactagataaatcgtttgcgagattgttgtgggaagcgggcatggaggatgcattatcattattatttaacgccttccatttggattcacaaatgttacgcacattcaacattttatggaaactataattttgtgaaaacaaataacaagaaaactcgtcatcgttcaaatttttaacgatagtaaaccgattaaacgtcgagctaatttctaacgctagcgactctgttggatatgggtttccagatatatatcttttcagttcccctacgtatctataatcatctgtaggaaatggaagatatttccatttatctactgttcctaatatcatatgtggtggtgtagtagaaccattaagcgcgaaagatgttatttcgcatcgtattttaacttcgcaataatttctggttagataacgcactctaccagtcaagtcaatgatattagcctttacagatatattcatagtagtcgtaacgatgactccatcttttagatgcgatactcctttgtatgtaccagaatcttcgtacctcaaactcgatatatttaaacaagttaatgagatattaacgcgttttatgaatgatgatatataaccagaagttttatcctcggtggctagcgctataaccttatcattataataccaactagtgtgattaatatgtgacacgtcagtgtgggtacaaatatgtacattatcgtctacgtcgtattcgatacatccgcatacagccaacaaatataaaatgacaaatactctaacgccgttcgtacccatcttgatgcggtttaataaatgttttgatttcaatttattgtaaaaaaagattcggttttatactgttcgatattctcattgcttatattttcatctatcatctccacacagtcaaatccgtggttagcatgcacctcatcaaccggtaaaagactatcggactcttctatcattataactctagaatatttaatttggtcattattaatcaagtcaattatcttatttttaacaaacgtgagtattttactcattttttataaaaacttttagaaatatacagactctatcgtgtgtctatatcttctttttatatccaatgtatttatgtctgatttttcttcatttatcatatataatggtccaaattctacacgtgcttcggattcatccagatcattaaggttcttataattgtaacatccttctcttccctcttctacatcttccttcttattcttattcttagcgtcacagaatctaccacagcaggatcccatgacgagcgtcatattaaactaatccattttcaattataatatatgattagtaatgaccattaaaataaaaaatattcttcataaccggcaagaaagtgaaaagttcacattgaaactatgtcagtagtatacatcatgaaatgatgatatatatatactctattttggtggaggattatatgatataattcgtggataatcatttttaagacacatttctttattcgtaaatcttttcacgttaaatgagtgtccatattttgcaatttcttcatatgatggcggtgtacgtggacgaggctgctcctgttcttgttgtggtcgccgactgtcgtgtctgcgtttagatccctccattatcgcgattgcgtagatggagtactattttataccttgtaattaaatttttttattaattaaacgtataaaaacgttccgtatctgtatttaagagccagatttcgtctaatagaacaaatagctacagtaaaaataactagaataattgctacacccactagaaaccacggatcgtaatacggcaatcggttttcgataataggtggaacgtatattttatttaaggacttaacaattgtctgtaaaccacaatttgcttccgcggatcctgtattaactatctgtaaaagcatatgttgaccgggcggagccgaacattctccgatatctaatttctgtatatctataatattattaacctccgcatacgcattacagttcttttctagcttggataccgcactaggtacatcgtctagatctattcctatttcctcagcgatagctcttctatccttttccggaagcaatgaaatcacttcaataaatgattcaaccatgagtgtgaaactaagtcgagaattactcatgcatttgttagttattcggagcgcgcaatttttaaactgtcctataacctctcctatatgaatagcacaagtgacattagtagggatagaatgttgagctaatttttgtaaataactatctataaaaagattatacaaagttttaaactctttagtttccgccatttatccagtctgagaaaatgtctctcataataaatttttccaagaaactaattgggtgaagaatggaaacctttaatctatatttatcacagtctgttttggtacacatgatgaattcttccaatgccgtactaaattcgatatctttttcgatttctggatatgtttttaataaagtatgaacaaagaaatggaaatcgtaataccagttatgtttaactttgaaattgttttttattttcttgttaatgattccagccacttgggaaaagtcaaagtcgtttaatgccgatttaatacgttcattaaaaacaaactttttatcctttagatgaattattattggttcattggaatcaaaaagtaagatattatcgggtttaagatctgcgtgtaaaaagttgtcgcaacagggtagttcgtagattttaatgtataacagagccatctgtaaaaagataaactttatgtattgtaccaaagatttaaatcctaatttgatagctaactcggtatctactttatctgccgaatacagtgctaggggaaaaattataatgtttcctctttcatattcgtagttagttctcttttcatgttcgaaaaagtgaaacatgcggttaaaatagtttataacattaatattactgttaataactgccggataaaagtgggatagtaatttcacgaatttgatactgtcctttctctcgttaaacgcctttaaaaaaactttagaagaatatctcaatgagagttcctgaccatccatagtttgtatcaataatagcaacatatgaagaacacgtttatacagagtatgtaaaaatgttaatttatagtttaatcccatggcccacgcacacacgattaattttttttcatctccctttagattgttgtatagaaatttgggtactgtgaactccgccgtagtttccatgggactatataattttgtggcctcgaatacaaattttactacatagttatctatcttaaagactataccatatcctcctgtagatatgtgataaaaatcgtcgtttataggataaaatcgtttatccttttgttggaaaaaggatgaattaatgtaatcattctcttctatctttagtagtgtttccttattaaaattcttaaaataatttaacaatctaactgacggagcccaattttggtgtaaatctaattgggacattatattgttaaaatacaaacagtctcctaatataacagtatctgataatctatggggagacatccattgatattcaggggatgaatcattggcaacacccatttattgtacaaaaagccccaatttacaaacgaaagtccaggtttgatagagacaaacaattaactattttgtctctgtttttaacacctccacagtttttaatttctttagtaatgaaattattcacaatatcagtatcttctttatctaccagagattttactaacttgataaccttggctgtctcattcaatagggtagtaatatttgtatgtgtgatattgatatctttttgaattgtttcttttagaagtgattctttgatggtgccagcatacgaattacaataatgcagaaactcggttaacatgcaggaattatagtaagccaattccaattgttgcctgtgttgtattagagtgtcaatatgagcaatggtgtccttgcgtttctctgatagaatgcgagcagcgattttggcgttatcatttgacgatatttctggaatgacgaatcctgtttctactaactttttggtaggacaaagtgaaacaatcaagaagatagcttctcctcctatttgtggaagaaattgaactcctctagatgatctactgacgatagtatctccttgacagatattggaccgaattacagaagtacctggaatgtaaagccctgaaaccccctcattttttaagcagattgttgccgtaaatcctgcactatgcccaagatagagagctcctttggtgaatccatctctatgtttcagtttaaccaagaaacagtcagctggtctaaaatttccatctctatctaatacagcatctaacttgatgtcaggaactatgaccggtttaatgttatatgtaacattgagtaaatccttaagttcataatcatcactgtcatcagttatgtacgatccaaacaatgtttctaccggcatagtggatacgaagatgctatccatcagaatgtttccctgattagtattttctatatagctattcttctttaaacgattttccaaatcagtaactatgttcatttttttaggagtaggacgcctagccagtatggaagaggattttctagatcctctcttcaacatctttgatctcgatggaatgcaaaaccccatagtgaaacaaccaacgataaaaataatattgtttttcactttttataattttaccatctgactcatggattcattaatatctttataagagctactaacgtataattctttataactgaactgagatatatacaccggatctatggtttccataattgagtaaatgaatgctcggcaataactaatggcaaatgtatagaacaacgaaattatactagagttgttaaagttaatattttctatgagctgttccaataaattatttgttgtgactgcgttcaagtcataaatcatcttgatactatccagtaaaccgtttttaagttctggaatattatcatcccattgtaaagcccctaattcgactatcgaatatcctgctctgatagcagtttcaatatcgacggacgtcaatactgtaataaaggtggtagtattgtcatcatcgtgataaactacgggaatatggtcgttagtaggtacggtaactttacacaacgcgatatataactttccttttgtaccatttttaacgtagttgggacgtcctgcagggtattgttttgaagaaatgatatcgagaacagatttgatacgatatttgttggattcctgattattcactataatataatctagacagatagatgattcgataaatagagaaggtatatcgttggtaggataatacatccccattccagtattctcggatactctattgatgacactagttaagaacatgtcttctattctagaaaacgaaaacatcctacatggactcattaaaacttctaacgctcctgattgtgtctcgaatgcctcgtacaaggatttcaaggatgccatagattctttgaccaacgatttagaattgcgtttagcatctgatttttttattaaatcgaatggtcggctctctggtttgctaccccaatgataacaatagtcttgtaaagataaaccgcaagaaaatttatacgcatccatccaaataaccctagcaccatcggatgatattaatgtattattatagattttccatccacaattattgggccagtatactgttagcaacggtatatcgaatagattactcatgtaacctactagaatgatagttcgtgtactagtcataatatctttaatccaatctaaaaaatttaaaattagattttttacactgttaaagttaacaaaagtattacccgggtacgtggatatcatatatggcattggtccattatcagtaatagctccataaactgatacggcgatggtttttatatgtgtttgatctaacgaggaagaaattcgcgcccacaattcatctctagatatgtatttaatatcaaacggtaacacatcaatttcgggacgcgtatatgtttctaaatttttaatccaaatataatgatgacctatatgccctattatcatactgtcaactatagtacacctagggaacttacgatacatctgtttcctataatcgttaaattttacaaatctataacatgctaaaccttttgacgacagccattcattaatttctgatatggaatctgtattctcgataccgtatcgttctaaagccagtgctatatctccctgttcgtgggaacgctttcgtataatatcgatcaacggataatctgaagtttttggagaataatatgactcatgatctatttcgtccataaacaatctagacataggaattggaggcgatgatcttaattttgtgcaatgagtcgtcaatcctataacttctaatcttgtaatattcatcatcgacataatactatctatgttatcatcgtatattagtataccatgaccttcttcatttcgtgccaaaatgatatacagtcttaaatagttacgcaatatctcaatagtttcataattgttagctgttttcatcaaggtttgtatcctgtttaacatgatggcgttctataacgtctctattttctatttttaattttttaaatttttaacgatttactgtggctagatacccaatctctctcaaatatttttttagcctcgcttacaagctgtttatctatactattaaaactgacgaatccgtgattttggtaatgggttccgtcgaaatttgccgaagtgatatgaacatattcgtcgtcgactatcaacaattttgtattattctgaatagtgaaaaccttcacagatagatcattttgaacacacaacgcatctagacttttggcggttgccatagaatatacgtcgttcttatcccaattaccaactagaagtctgatcttaactcctctattaatggctgcttctataatggagttgtaaatgtcgggccaatagtagctattaccgtcgacacgtgtagtgggaactatggccaaatgttcaatatctatactagtcttagctgacctgagtttatcaataactacatcggtatctagatctctagaatatcccaataggtgttccggagaatcagtaaagaacactccacctataggattcttaatatgatacgcagtgctaactggcaaacaacaagccgcagagcataaattcaaccatgaattttttgcgctattaaaggctttaaaagtatcaaatcttctacgaagatctgtggccagcgggggataatcagaatatacacctaacgttttaatcgtatgtatagatcctccagtaaatgacgcgtttcctacataacatctttcatcatctgacacccaaaaacaaccgagtagtagtcccacattattttttttatctatattaacggttataaaatttatatccgggcagtgactttgtagctctcccagatttcttttccctcgttcatctagcaaaactattattttaatccctttttcagatgcctcttttagtttatcaaaaataagcgctcccctagtcgtactcagaggattacaacaaaaagatgctatgtatatatatttcttagctagagtgataatttcgttaaaacattcaaatgttgttaaatgatcggatctaaaatccatattttctggtagtgtttctaccagcctacattttgctcccgcaggtaccgatgcaaatggccacatttagttaacataaaaacttatacatcctgttctatcaacgattctagaatatcatcggctatatcgctaaaattttcatcaaagtcgacatcacaacctaactcagtcaatatattaagaagttccatgatgtcatcttcgtctatttctatatccgtatccattgtagattgttgaccgattatcgagtttaaatcattactaatactcaatccttcagaatacaatctgtgtttcattgtaaatttataggcggtgtatttaagttggtagattttcaattatgtattaatatagcaacagtagttcttgctcctccttgattctagcatcctcttcattattttcttctacgtacataaacatgtccaatacgttagacaacacaccgacgatggcggccgcagatctcgagttatgatctacttccttaccgtgcaataaattagaatatattttctacttttacgagaaattaattattgtatttattatttatgggtgaaaaacttactataaaaagcgggtgggtttggaattagtgaaagcttaaaaattgaaattttattttttttttttggaatataaataagctcgaagtcgacagatctaggcctggtaccaggaggaggaattcagcttaaagatgacttcgaaagtttatgatccagaacaaaggaaacggatgataactggtccgcagtggtgggccagatgtaaacaaatgaatgttcttgattcatttattaattattatgattcagaaaaacatgcagaaaatgctgttatttttttacatggtaacgcggcctcttcttatttatggcgacatgttgtgccacatattgagccagtagcgcggtgtattataccagatcttattggtatgggcaaatcaggcaaatctggtaatggttcttataggttacttgatcattacaaatatcttactgcatggtttgaacttcttaatttaccaaagaagatcatttttgtcggccatgattggggtgcttgtttggcatttcattatagctatgagcatcaagataagatcaaagcaatagttcacgctgaaagtgtagtagatgtgattgaatcatgggatgaatggcctgatattgaagaagatattgcgttgatcaaatctgaagaaggagaaaaaatggttttggagaataacttcttcgtggaaaccatgttgccatcaaaaatcatgagaaagttagaaccagaagaatttgcagcatatcttgaaccattcaaagagaaaggtgaagttcgtcgtccaacattatcatggcctcgtgaaatcccgttagtaaaaggtggtaaacctgacgttgtacaaattgttaggaattataatgcttatctacgtgcaagtgatgatttaccaaaaatgtttattgaatcggatccaggattcttttccaatgctattgttgaaggcgccaagaagtttcctaatactgaatttgtcaaagtaaaaggtcttcatttttcgcaagaagatgcacctgatgaaatgggaaaatatatcaaatcgttcgttgagcgagttctcaaaaatgaacaagcggccgccgccaccatgagcaagggcgaggaactgttcactggcgtggtcccaattctcgtggaactggatggcgatgtgaatgggcacaaattttctgtcagcggagagggtgaaggtgatgccacatacggaaagctcaccctgaaattcatctgcaccactggaaagctccctgtgccatggccaacactggtcactaccttcacctatggcgtgcagtgcttttccagatacccagaccatatgaagcagcatgactttttcaagagcgccatgcccgagggctatgtgcaggagagaaccatctttttcaaagatgacgggaactacaagacccgcgctgaagtcaagttcgaaggtgacaccctggtgaatagaatcgagctgaagggcattgactttaaggaggatggaaacattctcggccacaagctggaatacaactataactcccacaatgtgtacatcatggccgacaagcaaaagaatggcatcaaggtcaacttcaagatcagacacaacattgaggatggatccgtgcagctggccgaccattatcaacagaacactccaatcggcgacggccctgtgctcctcccagacaaccattacctgtccacccagtctgccctgtctaaagatcccaacgaaaagagagaccacatggtcctgctggagtttgtgaccgctgctgggatcacacatggcatggacgagctgtacaagtgagcggccgccctgctagcaagcttgctagcggccgctcgagatctgcggccgctacagacacgaatatgactaaaccgatgaccatttaaaaacccctctctagctttcacttaaactgtatcgatcattcttttagcacatgtataatataaaaacattattctatttcgaatttaggcttccaaaaatttttcatccgtaaaccgataataatatatatagacttgttaatagtcggaataaatagattaatgcttaaactatcatcatctccacgattagagatacaatatttacattctttttgctgtttcgaaactttatcaatacacgttaatacaaacccaggaaggagatattgaaactgaggctgttgaaaatgaaacggtgaatacaataattcagataatgtaaaatcatgattccgtattctgatgatattagaactgctaatggatgtcgatggtatgtatctaggagtatctattttaacaaagcatcgatttgctaatatacaattatccttttgattaattgttattttattcatattcttaaaaggtttcatatttatcaattcttctacattaaaaatttccatttttaatttatgtagccccgcaatactcctcattacgtttcattttttgtctataatatccattttgttcatctcggtacatagattatccaattgagaagcgcatttagtagttttgtacattttaagtttattgacgaatcgtcgaaaactagttatagttaacattttattatttgataccctgatattaatacccctgccgttactattatttataactgatgtaatccacgtaacattggaattaactatcgatagtaatgcatcgacgcttccaaaattgtctattataaactcaccgataatttttttattgcatgttttcatattcattaggattatcaaatctttaatcttattacgattgtatgcgttgatattacaagacgtcattctaaaagacggaggatctccatcaaatgccagacaatcacgtacaaagtacatggaaataggttttgttctattgcgcatcatagatttatatagaacacccgtagaaatactaatttgttttactctataaaatactaatgcatctatttcatcgttttgtataacgtctttccaagtgtcaaattccaaatttttttcattgatagtaccaaattcttctatctctttaactacttgcatagataggtaattacagtgatgcctacatgccgttttttgaaactgaatagatgcgtctagaagcgatgctacgctagtcacaatcaccactttcatatttagaatatatatatgtaaaaatatagtagaatttcattttgtttttttctatgctataaatgaattctcattttgcatctgctcatactccgttttatattaataccaaagaaggaagatatctggttctaaaagccgttaaagtatgcgatgttagaactgtagaatgcgaaggaagtaaagcttcctgcgtactcaaagtagataaaccctcatcgcccgcgtgtgagagaagaccttcgtccccgtccagatgcgagagaatgaataaccctggaaaacaagttccgtttatgaggacggacatgctacaaaatatgttcgcggctaatcgcgataatgtagcttctagacttttgtcctaaaatactattatatccttttcgatattaataaatccgtgtcgtccaggttttttatctctttcagtatgtgaatagataggtattttatctctattcatcatcgaatttaagagatccgataaacattgtttgtattctccagatgtcagcatctgatacaacaatatatgtgcacataaacctctggcacttatttcatgtaccttccccttatcactaaggagaatagtatttgagaaatatgtatacatgatattatcatgaattagatatacagaatttgtaacactctcgaaatcacacgatgtgtcggcgttaagatctaatatatcactcgataacacattttcatctagatacactagacattttttaaagctaaaatagtctttagtagtaacagtaactatgcgattattttcatcgatgatacatttcatcggcatattattacgcttaccatcaaagactataccatgtgtatatctaacgtattctagcatggttgccatacgcgcattaaacttttcaggatctttggatagatcttccaatctatctatttgagaaaacatttttatcatgttcaatagttgaaacgtcggatccactatatagatattatctataaagattttaggaactacgttcatggtatcctggcgaatattaaaactatcaatgatatgattatcgttttcatcttttatcaccatatagtttctaagatatgggattttacttaatataatattatttcccgtgataaattttattagaaaggccaaatctataagaaaagtcctagaattagtctgaagaatatctatatcgccgtatagtatatttggattaattagatatagagaatatgatccgtaacatatacaacttttattatggcgtctaagatattcttccatcaacttattaacatttttgactagggaagatacattatgacgtcccattacttttgccttgtctattactgcgacgttcatagaatttagcatatctcttgccaattcttccattgatgttacattataagaaattttagatgaaattacatttggagctttaatagtaagaactcctaatatgtccgtgtatgtggtcactaatacagattgtagttctataatcgtaaataatttacctatattatatgtttgagtctgtttagaaaagtagctaagtatacgatcttttatttctgatgcagatgtattaacatcggaaaaaaatctttttttattcttttttactaaagatacaaatatgtctttgttaaaaacagttattttctgaatatttctagcttgtaattttaacatatgatattcgttcacactaggtactctgcctaaataggtttctataatctttaatgtaatattaggaaaagtattctgatcaggattcctattcattttgaggatttaaaactctgattattgtctaatatggtctctacgcaaactttttcacagagcgatagagtttttgataactcgtttttcttaagaaatataaaactactgtctccagagctcgctctatcttttattttatctaattcgatacaaactcctgatactggttcagaaagtaattcattaattttcagtcctttatagaagatatttaatatagataatacaaaatcttcagtttttgatatcgatctgattgatcctagaactagatatattaataacgtgctcattaggcagtttatggcagcttgataattagatatagtatattccagttcatatttattagataccgcattgcccagattttgatattctatgaattcctctgaaaataaatccaaaataactagacattctattttttgtggattagtgtactctcttccctctatcatgttcactactggtgtccacgatgataaatatctagagggaatataatatagtccataggatgccaatctagcaatgtcgaataactgtaattttattcttcgctcttcattatgaattgattcttgaggtataaacctaacacaaattatattattagacttttcgtatgtaatgtctttcatgttataagtttttaatcctggaatagaatctattttaatgaggcttttaaacgcagagttctccaacgagtcaaagcataatactctgttgtttttcttatatacgatgttacgattttcttctttgaatggaataggtttttgaattagtttataattacaacataatagataaggaagtgtgcaaatagtacgcggaaaaaacataatagctcccctgttttcatccatggttttaagtaaatgatcactggcttctttagtcaatggatattcgaacattaaccgtttcatcatcattggacagaatccatatttcttaatgtaaagagtgatcaaatcattgtgtttattgtaccatcttgttgtaaatgtgtattcggttatcggatctgctcctttttctattaaagtatcgatgtcaatctcgtctaagaattcaactatatcgacatatttcatttgtatacacataaccattactaacgtagaatgtataggaagagatgtaacgggaacagggtttgttgattcgcaaactattctaatacataattcttctgttaatacgtcttgcacgtaatctattatagatgccaagatatctatataattattttgtaagatgatgttaactatgtgatctatataagtagtgtaataattcatgtattttgatatatgttccaactctgtctttgtgatgtctagtttcgtaatatctatagcatcctcaaaaaatatattcgcatatattcccaagtcttcagttctatcttctaaaaaatcttcaacgtatggaatataataatctattttacctcttctgatatcattaatgatatagtttttgacactatcttctgtcaattgattcttattcactatatctaagaaacggatagcgtccctaggacgaactactgccattaatatctctattatagcttctggacataattcatctattataccagaattaatgggaactattccgtatctatctaacatagttttaagaaagtcagaatctaagacttgatgttcatatattggttcatacatgaaatgatctctattgatgatagtgactatttcattctctgaaaattggtaactcattctatatatgctttccttgttgatgaaggatagaatatactcaatagaatttgtaccaacaaactgttctcttatgaatcgtatatcatcatctgaaataatcatgtaaggcatacatttaacaattagagacttgtctcctgttatcaatatactattcttgtgataatttatgtgtgaggcaaatttgtccacgttctttaattttgttatagtagatatcaaatccaatggagctacagttcttggcttaaacagatatagtttttctggaacaaattctacaacattattataaaggactttgggtagataagtgggatgaaatcctattttaattaatgcgatagccttgtcctcgtgcagatatccaaacgcttttgtgatagtatggcattcattgtctagaaacgctctacgaatatctgtgacagatatcatctttagagaatatactagtcgcgttaatagtactacaatttgtattttttaatctatctcaataaaaaaattaatatgtatgattcaatgtataactaaactactaactgttattgataactagaatcagaatctaatgatgacgtaaccaagaagtttatctactgccaatttagctgcattatttttagcatctcgtttagattttccatcggccttatcgaatactcttccgtcgatgtctacacaggcataaaatgtaggagagttactaggcccaactgattcaatacgaaaagaccaatctctcctagtaatttggcagtactcattaataacggtgacagggttagcatctttccaatcaataatttttttagccggaataacatcatcaaaagacttatgatcctctctcattgatttttcgcgggatacatcatctattatgacgtcagccatagcatcagcatccggcttatccgcctccgttgtcataaaccaacgaggaggaatatcgtcggagctgtacaccatagcactacgttgaagatcgtacagagctttattaacttctcgcttctccatattaagttgtctagttagttgtgcagcagtagctccttcgattccaatgtttttaatagccgcacacacaatctctgcgtcagaacgctcgtcaatatagatcttagacatttttagagagaactaacgcaaccagcaataaaactgaacctactttatcatttttttattcatcatcctctggtggttcgtcgttcctatcaaatgtagctctgattaacccgtcatctataggtgatgctggttctggagattctggaggagatggattattatctggaagaatctctgttatttccttgttttcatgtatcgattgcgttgtaacattaagattgcgaaatgctctaaatttgggaggcttaaagtgttgtttgcaatctctacacgcgtgtctaactagtggaggttcgtcagctgctctagtttgaatcatcatcggcgtagtattcctacttttacagttaggacacggtgtattgtatttctcgtcgagaacgttaaaataatcgttgtaactcacatcctttattttatctatattgtattctactcctttcttaatgcattttataccgaataagagatagcgaaggaattctttttcggtgccgctagtacccttaatcatatcacatagtgttttatattccaaatttgtggcaatagacggtttatttctatacgatagtttgtttctggaatcctttgagtattctataccaatattattctttgattcgaatttagtttcttcgatattagattttgtattacctatattcttgatgtagtactttgatgatttttccatggcccattctattaagtcttccaagttggcatcatccacatattgtgatagtaattctcggatatcagtagcggctaccgccattgatgtttgttcattggatgagtaactactaatgtatacattttccatttataacacttatgtattaactttgttcatttatattttttcattattatgttgatattaacaaaagtgaatatatatatgttaataattgtattgtggttatacggctacaattttataatgagtgaaagtcagtgtccgatgatcaatgacgatagctttactctgaaaagaaagtatcaaatcgatagtgcggagtcaacaataaaaatggataagaagaggataaagtttcagaatagagccaaaatggtaaaagaaataaatcagacaataagagcagcacaaactcattacgagacattgaaactaggatacataaaatttaagagaatgattatgactactactctagaagatatagcaccatctattccaaataatcagaaaacttataaactattctcggacatttcagccatcggcaaagcatcacagaatccgagtaagatggtatatgctctgctgctttacatgtttcccaatttgtttggagatgatcatagattcattcgttatagaatgcatccaatgagtaaaatcaaacacaagatcttctctcctttcaaacttaatcttattagaatattagtggaagaaagattctataataatgaatgcagatctaataaatggagaataattggaacacaagttgataaaatgttgatagctgaatctgataaatatacaatagatgcaaggtataacctaaaacccatgtatagaatcaagggagaatctgaagaagataccctctttatcaaacagatggtagaacaatgtgtgacatcccaggaattggtggaaaaagtgttgaagatactgtttagagatttgttcaagagtggagaatacaaagcgtacagatacgatgatgatgtagaaaatggatttattggattggatacactaaaattaaacattgttcatgatatagttgaaccatgtatgcctgttcgtaggccagtggctaagatactgtgtaaagaaatggtaaataaatactttgagaatccgctacatattattggtaaaaatcttcaagagtgcattgactttgttagtgaataggcatttcatctttctccaatactaattcaaattgttaaattaataatggatagtataaatagttattagttataagatagtaaaaataattattagaataagagtgtagtatcatagataactctcttctataaaaatggattttattcgtagaaagtatcttatatacacagtagaaaataatatagattttttaaaggatgatacattaagtaaagtaaacaattttaccctcaatcatgtactagctctcaagtatctagttagcaattttcctcaacacgttattactaaggatgtattagctaataccaatttttttgttttcatacatatggtacgatgttgtaaagtgtacgaagcggttttacgacacgcatttgatgcacccacgttgtacgttaaagcattgactaagaattatttatcgtttagtaacgcaatacaatcgtacaaggaaaccgtgcataaactaacacaagatgaaaaatttttagaggttgccgaatacatggacgaattaggagaacttataggcgtaaattatgacttagttcttaatccattatttcacggaggggaacccatcaaagatatggaaatcatttttttaaaactgtttaagaaaacagacttcaaagttgttaaaaaattaagtgttataagattacttatttgggcatacctaagcaagaaagatacaggcatagagtttgcggataatgatagacaaaatatatacactctatttcaacaaactggtagaatcgtccatagcaatctaacagaaacgtttagagattatatctttcccggagataagactagctattgggtgtggttaaacgaaagtatagctaatgatgcggatatcgttcttaatagacacgccattaccatgtatgataaaattcttagttatatatactctgagataaaacaaggacgcgttaataaaaacatgcttaagttagtttatatctttgagcctgaaaaagatatcagagaacttctgctagaaatcatatatgatattcctggagatatcctatctattattgatgcaaaaaacgacgattggaaaaaatattttattagtttttataaagctaattttattaacggtaatacatttattagtgatagaacgtttaacgaggacttattcagagttgttgttcaaatagatcccgaatatttcgataatgaacgaattatgtctttattctctacgagtgctgcggacattaaacgatttgatgagttagatattaataacagttatatatctaatataatttatgaggtgaacgatatcacattagatacaatggatgatatgaagaagtgtcaaatctttaacgaggatacgtcgtattatgttaaggaatacaatacatacctgtttttgcacgagtcggatcccatggtcatagagaacggaatactaaagaaactgtcatctataaaatccaagagtagacggctgaacttgtttagcaaaaacattttaaaatattatttagacggacaattggctcgtctaggtcttgtgttagatgattataaaggagacttgttagttaaaatgataaaccatcttaagtctgtggaggatgtatccgcattcgttcgattttctacagataaaaaccctagtattcttccatcgctaatcaaaactattttagctagttataatatttccatcatcgtcttatttcaaaggtttttgagagataatctatatcatgtagaagaattcttggataaaagcatccatctaaccaagacggataagaaatatatacttcaattgataagacacggtagatcatagaacagaccaaatatattattaataatttgtatatacatagatataattatcacacatttttgataaatgggaactgctgcaacaattcagactcccaccaaattaatgaataaagaaaatgcagaaatgattttggaaaaaattgttgatcatatagttatgtatattagtgacgaatcaagtgattcagaaaataatcctgaatatattgattttcgtaacagatacgaagactatagatctctcattataaaaagtgatcacgagtttgtaaagctatgtaaaaatcatgcggagaaaagttctccagaaacgcaacaaatgattatcaaacacatatacgaacaatatcttattccagtatctgaagtactattaaaacctataatgtccatgggtgacataattacatataacggatgtaaagacaatgaatggatgctagaacaactctctaccctaaactttaacaatctccgcacatggaactcatgtagcataggcaatgtaacgcgtctgttttatacattttttagttatctgatgaaagataaactaaatatataagtataatcccattctaatactttaacctgatgtattagcatcttattagaatattaacctaactaaaagacataacataaaaactcattacatagttgataaaaagcggtaggatataaatattatggctgccaccgttccgcgttttgacgacgtgtacaaaaatgcacaaagaagaattctagatcaagaaacattttttagtagaggtctaagtagaccgttaatgaaaaacacatatctatttgataattacgcgtatggatggataccagaaactgcaatttggagtagtagatacgcaaacctagatgctagtgactattatcccatttcgttgggattacttaaaaagttcgagtttctcatgtctctatataaaggtcctattcccgtatatgaagaaaaagtaaatactgaattcatagccaatggatcgttctctggtagatacgtatcatatcttcgaaagttttctgcccttccaacaaacgagtttattagttttttgttactgacttccattccaatctataatatcttgttctggtttaaaaacacacagtttgatattactaaacacacattattcagatacgtctatacagataatgccaaacacctggcgttggctaggtatatgcatcaaacaggagactataagcctttgtttagtcgtctcaaagagaattatatatttaccggtcccgttccaataagtatcaaagatatagatcaccctaatcttagtagagcaagaagtccatccgattatgagacattagctaatattagtactatattgtactttaccaagtatgatccggtattaatgtttttattgttttacgtacctgggtattcaattactacaaaaattactccagccgtagaatatctaatggataaactgaatctaacaaagagcgacgtacaactgttgtaaattattttatgcttcgtaaaatgtaggttttgaaccaaacattctttcaaagaatgagatgcataaaactttattatccaatagattgactatttcggacgtcaatcgtttaaagtaaacttcgtaaaatattctttgatcactgccgagtttaaaacttctatcgataattgtctcatatgttttaatatttacaagttttttggtccatggtacattagccggacaaatatatgcaaaataatatcgttctccaagttctatagtttctggattatttttattatattcagtaactaaatacatattagggttatctgcggatttataatttgagtgatgcattctactcaacataaataattctagaggagacgatctactatcaaattcggatcgtaaatctgtttctaaagaacggagaatatctatacatacctgattagaattcatccgtccttcagacaacatctcagacagtctggttttgtacatcttaatcatattcttatgaaacttggaaacatctcttctagtttcactagtacctttattaattctctcaggtacagattttgaattcgacgatgctgagtatttcatcgttgtatatttcttcttcgattgcataatcagattcttatataccgcctcaaactctattttaaaattattaaacaatactctattattaatcagtcgttctaactctttcgctatttctatagacttatctacatcttgactgtctatctctgtaaacacggagtcggtatctccatacacgctacgaaaacgaaatctgtaatctataggcaacgatgttttcacaatcggattaatatctctatcgtccatataaaatggattacttaatggattggcaaaccgtaacataccgttagataactctgctccatttagtaccgattctagatacaagatcattctacgtcctatggatgtgcaactcttagccgaagcgtatgagtatagagcactatttctaaatcccatcagaccatatactgagttggctactatcttgtacgtatattgcatggaatcatagatggccttttcagttgaactggtagcctgttttagcatctttttatatctggctctctctgccaaaaatgttcttaatagtctaggaatggttccttctatcgatctatcgaaaattgctatttcagagatgaggttcggtagtctaggttcacaatgaaccgtaatatatctaggaggtggatatttctgaagcaatagctgattatttatttcttcttccaatctattggtactaacaacgacaccgactaatgtttccggagatagatttccaaagatacacacattaggatacagactgttataatcaaagattaatacattattactaaacattttttgttttggagcaaataccttaccgccttcataaggaaacttttgttttgtttctgatctaactaagatagttttagtttccaacaatagctttaacagtggacccttgatgactgtactcgctctatattcgaataccatggattgaggaagcacatatgttgacgcacccgcgtctgtttttgtttctactccataatactcccacaaatactgacacaaacaagcatcatgaatacagtatctagccatatctaaagctatgtttagattataatccttatacatctgagctaaatcaacgtcatcctttccgaaagataatttatatgtatcattaggtaaagtaggacataatagtacgactttaaatccattttcccaaatatctttacgaattactttacatataatatcctcatcaacagtcacataattacctgtggttaaaacctttgcaaatgcagcggctttgcctttcgcgtctgtagtatcgtcaccgatgaacgtcatttctctaactcctctatttaatactttacccatgcaactgaacgcgttcttggatatagaatccaatttgtacgaatccaatttttcaaatttttgaatgaatgaatatagatcgaaaaatatagttccattattgttattaacgtgaaacgtagtattggccatgccgcctactcccttatgactagactgatttctctcataaatacagagatgtacagcttcctttttgtccggagatctaaagataattttctctcctgttaataactctagacgattagtaatatatctcagatcaaagttatgtccgttaaaggtaacgacgtagtcgaacgttagttccaacaattgtttagctattcgtaacaaaactatttcagaacatagaactagttctcgttcgtaatccatttccattagtgactgtatcctcaaacatcctctatcgacggcttcttgtatttcctgttccgttaacatctcttcattaatgagcgtaaacaataatcgtttaccacttaaatcgatataacagtaacttgtatgcgagattgggttaataaatacagaaggaaacttcttatcgaagtgacactctatatctagaaataagtacgatcttgggatatcgaatctaggtatttttttagcgaaacagttacgtggatcgtcacaatgataacatccattgttaatctttgtcaaatattgctcgtccaacgagtaacatccgtctggagatatcccgttagaaatataaaaccaactaatattgagaaattcatccatggtggcattttgtatgctgcgtttctttggctcttctatcaaccacatatctgcgacggagcattttctatctttaatatctagattataacttattgtctcgtcaatgtctatagttctcatctttcccaacggcctcgcattaaatggaggaggagacaatgactgatatatttcgtccgtcactacgtaataaaagtaatgaggaaatcgtataaatacggtctcgccatttcgacatctggatttcagatataaaaatctgttttcaccgtgactttcaaaccaattaatgcaccgaacatccatttatagaatttagaaatatattttcatttaaatgaatcccaaacattggggaagagccgtatggaccattatttttatagtactttcgcaagcgggtttagacggcaacatagaagcgtgtaaacgaaaactatatactatagttagcactcttccatgtcctgcatgtagacggcacgcgactatcgctatagaggacaataatgtcatgtctagcgatgatctgaattatatttattattttttcatcagattatttaacaatttggcatctgatcccaaatacgcgatcgatgtgacaaaggttaaccctttataaacttaacccattataaaacttatgattagtcacaactgaaataaccgcgtgattattttttggtataattctacacggcatggtttctgtgactatgaattcaacccccgttacattagtgaaatctttaacaaacagcaagggttcgtcaaagacataaaactcattgtttacaatcgaaatagaccccctatcacacttaaaataaaaaatatccttatcctttaccaccaaataaaattctgattggtcaatgtgaatgtattcacttaacagttccacaaatttatttattaactccgaggcacatacatcgtcggtattttttatggcaaactttactcttccagcatccgtttctaaaaaaatattaacgagttccatttatatcatccaatattattgaaatgacgttgatggacagatgatacaaataagaaggtacggtacctttgtccaccatctcctccaattcatgctctattttgtcattaactttaatgtatgaaaacagtacgccacatgcttccatgacagtgtgtaacactttggatacaaaatgtttgacattagtataattgtccaagactgtcaatctataatagatagtagctataatatattctatgatggtattgaagaagatgacaaccttggcatattgatcatttaacacagacatggtatcaacagatagcttgaatgaaagagaatcagtaattggaataagcgtcttctcgatagagtgtccgtataccaacatgtctgatattttgatgtattccattaaattatttagttttttctttttattctcgttaaacagcatttctgtcaacggaccccaacatcgttgaccgattaagttttgattgatttttccgtgtaaggcgtatctagtcagatcgtatagcctatccaataatccatcgtctgtgtgtagatcacatcgtacactttttaattctctatagaagagcgacagacatctggagcaattacagacagcaatttctttattctctacagatgtaagatacttgaagacattcctatgatgatgcagaattttggataacacggtattgatggtatctgttaccataattcctttgatggctgatagtgtcagagcacaagatttccaatctttgacaatttttagcaccattatctttgttttgatatctatatcagacagcatggtgcgtctgacaacacagggattaagacggaaagatgaaatgattctctcaacatcttcaatagataccttgctattttttctggcattatctatatgtgcgagaatatcctctagagaatcagtatcctttttgatgatagtggatctcaatgacatgggacgtttaaaccttcttattctatcaccagattgcatggtgatttgtcttctttcttttatcataatgtaatctctaaattcatcggcaaattgtctatatctaaaatcataatatgagatgtttacctctacaaatatctgttcgtccaatgttagagtatttacatcagttttgtattccaaattaaacatggcaacggatttaattttatattcctctattaagtcctcgtcgataataacagaatgtagataatcatttaatccgtcgtacatggttggaagatgcttgttgacaaaatctttaattgtcttgatgaaggtgggactatatctaacatcttgattaataaaatttataacattgtccataggatactttgtaactagttttatacacatctcttcatcggtaagtttagacagaatatcgtgaacaggtggtatattatattcatcagatatacgaagaacaatgtccaaatctatattgtttaatatattatatagatgtagcgtagctcctacaggaatatctttaactaagtcaatgatttcatcaaccgttagatctattttaaagttaatcatataggcattgatttttaaaaggtatgtagccttgactacattctcattaattaaccattccaagtcattgtgtgtaagaagattatattctatcataagcttgactacatttggtcccgataccattaaagaattcttatgatataaggaaacagattttaggtactcatctactctacaagaattttggagagccttaacgatatcagtgacgtttattatttcaggaggaaagaatctaacattgagaatatcggaattaatagcttccagatacagtgattttggcaatagtccgtgtaatccataatccagtaacacgagctggtgcttgctagacaccttttcaatgtttaatttttttgaaataagctttgataaagccttcctcgcaaattccggatacatgaacatgtcggcgacatgattaagtattgttttttcattatttttatattttctcaacaagttctcaataccccaatagatgatagaatatcacccaatgcgtccatgttgtctatttccaacaggtcgctatatccaccaatagaagtttttccaaaaaagattctaggaacagttctaccaccagtaatttgttcaaaataatcccgcaattcattttcgggtttaaattctttaatatcgacaatttcatacgctcctcttttgaaactaaacttatttagaatatccagtgcatttctacaaaaaggacatgtatacttgacaaaaattgtcactttgttattggccaacctttgttgtacaaattcctcggccattttaatatttaagtgatataaaactatctcgacttatttaactctttagtcgagatatatggacgcagatagctatatgatagccaactacagaaggcaaacgctataaaaaacataattacgacgagcatatttataaatatttttattcagcattacttgatatagtaatattaggcacagtcaaacattcaaccactctcgatacattaactctctcattttctttaacaaattctgcaatatcttcgtaaaaagattcttgaaactttttagaatatctatcgactctagatgaaatagcgttcgtcaacatactatgttttgtatacataaaggcgcccattttaacagtttctagtgacaaaatgctagcgatcctaggatcctttagaatcacatagattgacgattcgtctctcttagtaactctagtaaaataatcatacaatctagtacgcgaaataatattatccttgacttgaggagatctaaacaatctagttttgagaacatcgataagttcatcgggaatgacatacatactatctttaatagaactcttttcatccagttgaatggattcgtccttaaccaactgattaatgagatcttctattttatcattttccagatgatatgtatgtccattaaagttaaattgtgtagcgcttctttttagtctagcagccaatactttaacatcactaatatcgatatacaaaggagatgatttatctatggcattaagaattcgtttttcgacatccgtcaaaaccaattcctttttgcctgtatcatccagttttccatcctttgtaaagaaattattttctactagactattaataagactgataaggattcctccataattgcacaatccaaactttttaacaaaactagactttacgagatctacaggaatgcgtacttcaggttttttagcttgtgattttttcttttgcggacattttctagtaaccaactcatctaccatttcattgattttagcagtgaaataagctttcaatgcacgggcactgatactattgaaaacgagttgatcttcaaattccgccatttaagttcaccaaacaacttttaaatacaaatatatcaatagtagtagaataagaactataaaaaaaataataattaaccaaccccaacaaccggtattattagttgatgtggtagttttctcatcacttagaacagatttaacaatttctataaagtctgtcaaatcatcttccggagaccccataaatacaccaaatatagcggcgtacaacttatccatttatacattgaatattggcttttctttatcgctatcttcatcatattcatcatcaatatcaacaagtcccagattacgagccagatcttcttctacattttcagtcattgatacacgttcactatctccagagagtccgataacgttagccaccacttctctatcaatgattagtttcttgagcgcgaaagtaatttttgtttccgttccggatctatagaagacgataggtgtgataattgccttggccaattgtctttctcttttactgagtgattctagttcaccttctatagatctgagaatggatgattctccagtcgaaacatattctaccatggatccgtttaatttgttgatgaagatggattcatccttaaatgttttctctgtaatagtttccaccgaaagactatgcaaagaatttggaatgcgttccttgtgcttaatgtttccatagacggcttctagaagttgatacaacataggactagccgcggtaacttttatttttagaaagtatccatcgcttctatcttgtttagatttatttttataaagtttagtctctccttccaacataataaaagtggaagtcatttgactagataaactatcagtaagttttatagagatagacgaacaattagcgtattgagaagcatttagtgtaacgtattcgatacattttgcattagatttactaatcgattttgcatactctataacacccgcacaagtctgtagagaatcgctagatgcagtaggtcttggtgaagtttcaactctcttcttgattaccttactcatgattaaacctaaataattgtactttgtaatataatgatatatattttcactttatctcatttgagaataaaaatgtttttgtttaaccactgcatgatgtacagatttcggaatcgcaaaccaccagtggttttattttatccttgtccaatgtgaattgaatgggagcggatgcgggtttcgtacgtagatagtacattcccgtttttagaccgagactccatccgtaaaaatgcatactcgttagtttggaataactcggatctgctatatggatattcatagattgactttgatcgatgaaggctcccctgtctgcagccatttttatgatcgtcttttgtggaatttcccaaatagttttataaactcgcttaatatcttctggaaggtttgtattctgaatggatccaccatctgccataatcctattcttgatctcatcattccataattttctctcggttaaaactctaaggagatgcggattaactacttgaaattctccagacaatactctccgagtgtaaatattactggtatacggttccaccgactcattatttcccaaaatttgagcagttgatgcagtcggcataggtgccaccaataaactatttctaagaccgtatgttctgattttatcttttagaggttcccaattccaaagatccgacggtacaacattccaaagatcatattgtagaataccgttactggcgtacgatcctacatatgtatcgtatggtccttccttctcagctagttcacaactcgcctctaatgcaccgtaataaatggtttcgaagatcttcttatttagatcttgtgcttccaggctatcaaatggataatttaagagaataaacgcgtccgctaatccttgaacaccaataccgataggtctatgtctcttattagagatttcagcttctggaataggataataattaatatctataattttattgagatttctgacaattactttgaccacatccttcagtttgagaaaatcaaatcgcccatctattacaaacatgttcaaggcaacagatgccagattacaaacggctacctcattagcatccgcatattgtattatctcagtgcaaagattactacacttgatagttcctaaattttgttgattactctttttgttacacgcatccttataaagaatgaatggagtaccagtttcaatctgagattctataatcgctttccagacgactcgagcctttattatagatttgtatctcctttctctttcgtatagtgtatacaatcgttcgaactcgtctccccaaacattgtccaatccaggacattcatccggacacatcaacgaccactctccgtcatccttcactcgtttcataaagagatcaggaatccaaagagctataaatagatctctggttctatgttcctcgtttcctgtattctttttaagatcgaggaacgccataatatcagaatgccacggttccaagtatatggccataactccaggccgtttgtttcctccctgatctatgtatctagcggtgttattataaactctcaacattggaataataccgtttgatataccattggtaccggagatatagcttccactggcacgaatattactaattgatagacctattccccctgccattttagagattaatgcgcatcgttttaacgtgtcatagataccctctatgctatcatcgatcatgttaagtagaaaacagctagacatttggtgacgactagttcccgcattaaataaggtaggagaagcgtgcgtaaaccatttttcagaaagtagattgtacgtctcaatagctgagtctatatcccattgatgaattcctactgcgacacgcattaacatgtgctgaggtctttcaacgatcttgttgtttattttcaacaagtaggatttttccaaagttttaaaaccaaaatagttgtatgaaaagtctcgttcgtaaataataaccgagttgagtttatccttatatttgttaactatatccatggtgatacttgaaataatcggagaatgtttcccatttttaggattaacatagttgaataaatcctccatcacttcactaaatagtttttttgtttccttgtgtagatttgatacggctattctggcggctagaatggcataatccggatgttgtgtagtacaagtggctgctatttcggctgccagagtgtccaattctaccgttgttactccattatatattccttgaataaccttcatagctattttaataggatctatatgatccgtgtttaagccataacataattttctaatacgagacgtgattttatcaaacatgacattttccttgtatccatttcgtttaatgacaaacatttttgttggtgtaataaaaaaattatttaacttttcattaatagggatttgacgtatgtagcgtacaaaatgattgttcctggtatatagataaagagtcctatatatttgaaaatcgttacggctcgattaaactttaatgattgcatagtgaatatatcattaggatttaactccttgactatcatggcggcgccagaaattaccatcaaaagcattaatacagttataccgatcgcagttagaacggttatagcatccaccatttatatctaaaaattagatcaaagaatatgtgacaaagtcctagttgtatactgagaattgacgaaacaatgtttcttacatatttttttcttattagtaaccgacttaatagtaggaactggaaaactagacttgattattctataagtatagatacccttccaaataatattctctttgataaaagttccagaaaatgtagaattttttaaaaagttatcttttgctattaccaagattgtgtttagacgcttattattaatatgagtgatgaaatccacaccgcctctagatatcgcctttatttccacattagatggtaaatccaatagtgaaactatctttttaggaatgtatggactcgcgtttagaggagtaaacgtcttaggcgtcggaaaggatgattcatcaaacgaataaacaatttcacaaatggatgttaatgtattagtaggaaattttttgacgctattggaattgaagattctaatggatgatgttctacctatttcatccgataacatgttaatttccgacaccaacggttttaatatttcgatgatatacggtagtctctctttcggacttatatagcttattccacaatacgagtcattatatactccaaaaaacaaaataactagtataaaatctgtatcgaatgggaaaaacgaaattatcgacataggtatagaatccggaacattgaacgtattaatacttaattctttttctgtggtaagtaccgataggttattgacattgtatggttttaaatattctataacttgagacttgatagatattagtgatgaattgaaaattatttttatcaccacgtgtgtttcaggatcatcgtcgacgcccgtcaaccaaccgaacggagtaaaataaatatcattaatatatgctctagatattagtatttttatcaatcctttgattatcatcttctcgtaggcgaatgattccatgatcaagagtgatttaagaacatcctccggagtattaatgggcttagtaaacagtccatcgttgcaataataaaagttatccaagttaaaggatattatgcattcgtttaaagatatcacctcatctgacggagacaattttttggtaggttttagagactttgaagctacttgtttaacaaagttattcatcgtcgtctactattctatttaattttgtagttaatttatcacatatcacattaattgactttttggtccacttttccatacgtttatattcttttaatcctgcgttatccgtttccgttatatccagggatagatcttgcaagttaaatagaatgctcttaaataatgtcattttcttatccgctaaaaatttaaagaatgtataaacctttttcagagatttgaaactcttaggtggtgtcctagtacacaatatcataaacaaactaataaacattccacattcagattccaacagctgattaacttccacattaatacagcctattttcgctccaaatgtacattcgaaaaatctgaataaaacatcgatgtcacaatttgtattatccaatacagaatgtttgtgattcgtgttaaaaccatcggagaaggaatagaaataaaaattattatagtggtggaattcagttggaatattgcctccggagtcataaaaggatactaaacattgttttttatcataaattacacatttccaatgagacaaataacaaaatccaaacattacaaatctagaggtagaacttttaattttgtctttaagtatatacgataagatatgtttattcataaacgcgtcaaatttttcatgaatcgctaaggagtttaagaatctcatgtcaaattgtcctatataatccacttcggatccataagcaaactgagagactaagttcttaatacttcgattgctcatccaggctcctctctcaggctctattttcatcttgacgacctttggattttcaccagtatgtattcctttacgtgataaatcatcgattttcaaatccatttgtgagaagtctatcgccttagatactttttcccgtagtcgaggtttaaaaaaatacgctaacggtatactagtaggtaactcaaagacatcatatatagaatggtaacgcgtctttaactcgtcggttaactctttcttttgatcgagttcgtcgctactattgggtctgctcaggtgccccgactctactagttccaacatcataccgataggaatacaagacactttgccggcggttgtagatttatcatatttttccactacatatccgttacaatttgttaaaaatttagatacatctatattgctacataatccagctagtgaatatatatgacataataaattggtaaatcctagttctggtattttactaattactaaatctgtatatctttccatttatcatggaaaagaatttaccagatatcttcttttttccaaactgcgttaatgtattctcttacaaatattcacaagatgaattcagtaatatgagtaaaacggaacgtgatagtttctcattggccgtgtttccagttataaaacatagatggcataacgcacacgttgtaaaacataaaggaatatacaaagttagtacagaagcacgtggaaaaaaagtatctcctccatcactaggaaaacccgcacacataaacctaaccgcgaagcaatatatatacagtgaacacacaataagctttgaatgttatagttttctaaaatgtataacaaatacagaaatcaattcgttcgatgagtatatattaagaggactattagaagctggtaatagtttacagatattttccaattccgtaggtaaacgaacagatactataggtgtactagggaataagtatccatttagcaaaattccattggcctcattaactcctaaagcacaacgagagatattttcagcgtggatttctcatagacctgtagttttaactggaggaactggagtgggtaagacgtcacaggtacccaagttattgctttggtttaattatttatttggtggattctctactctagataaaatcactgactttcacgaaagaccagtcattctatctcttcctaggatagctttagttagattgcatagcaataccattttaaaatcattgggatttaaggtactagatggatctcctatttctttacggtacggatctataccggaagaattaataaacaaacaaccaaaaaaatatggaattgtattttctacccataagttatctctaacaaaactatttagttatggcactcttattatagacgaagttcatgagcatgatcaaataggagatattattatagcagtagcgagaaagcatcatacgaaaatagattctatgtttttaatgactgccacgttagaggatgacagggaacggctaaaagtatttttacctaatcccgcatttatacatattcctggagatacactgtttaaaattagcgaggtatttattcataataagataaatccatcttccagaatggcatacatagaagaagaaaagagaaatttagttactgctatacagatgtatactcctcctgatggatcatccggtatagtctttgtggcatccgttgcacagtgtcacgaatataaatcatatttagaaaaaagattaccgtatgatatgtatattattcatggtaaggtcttagatatagacgaaatattagaaaaagtgtattcatcacctaatgtatcgataattatttctactccttatttggaatccagcgttactatacgcaatgttacacacatttatgatatgggtagagtttttgtccccgctccttttggaggatcgcaacaatttatttctaaatctatgagagatcaacgaaaaggaagagtaggaagagttaatcctggtacatacgtctatttctatgatctgtcttatatgaagtctatacagcgaatagattcagaatttctacataattatatattgtacgctaataagtttaatctaacactccccgaagatttgtttataatccctacaaatttggatattctatggcgtacaaaggaatatatagactcgttcgatattagtacagaaacatggaataaattattatccaattattatatgaagatgatagagtatgctaaactttatgtactaagtcctattctcgctgaggagttggataactttgagaggacgggagaattaactagtattgtacgagaagccattttatctctaaatttacaaattaagattttaaattttaaacataaagatgatgatacgtatatacacttttgtaaaatattattcggtgtctataacggaacaaacgctactatatattatcatagacctctaacgggatatatgaatatgatttcagatactatatttgttcctgtagataataactaaaaatcaaactctaatgaccacatctttttttagagatgaaaaattttccacatctccttttgtagacacgactaaacattttgcagaaaaaagtttattagtgtttagataatcgtatacttcatcagtgtagatagtaaatgtgaacagataaaaggtattcttgctcaatagattggtaaattccatagaatatattaatcctttcttcttgagatcccacatcatttcaaccagagacgttttatccaatgatttacctcgtactataccacatacaaaactagattttgcagtgacgtcgtacctggtattcctaccaaacaaaattttacttttagttcttttagaaaattctaaggtagaatctctatttgccaatatgtcatctatggaattaccactagcaaaaaatgatagaaatatatattgatacatcgcagctggttttgatctactatactttaaaaacgaatcagattccataattgcctgtatatcatcagctgaaaaactatgttttacacgtattccttcggcatttctttttaatgatatatcttgtttagacaatgataaagttatcatgtccatgagagacgcgtctccgtatcgtataaatatttcattagatgttagacgcttcattaggggtatacttctataaggtttcttaatcagtccatcattggttgcgtcaagaactactatcggatgttgttgggtatctctagtgttacacatggccttactaaagtttgggtaaataactatgatatctctattaattatagatgcatatatttcattcgtcaaggatattagtatcgacttgctatcgtcattaatacgtgtaatgtaatcatataaatcatgcgatagccaaggaaaatttaaatagatgttcatcatataatcgtcgctataattcatattaatacgttgacattgactaatttgtaatatagcctcgccacgaagaaagctctcgtattcagtttcatcgataaaggataccgttaaatataactggttgccgatagtctcatagtctattaagtggtaagtttcgtacaaatacagaatccctaaaatattatctaatgttggattaatctttaccataactgtataaaatggagacggagtcataactattttaccgtttgtacttactggaatagatgaaggaataatctccggacatgctggtaaagacccaaatgtctgtttgaagaaatccaatgttccaggtcctaatctcttaacaaaaattacgatattcgatcccgatatcctttgcattctatttaccagcatatcacgaactatattaagattatctatcatgtctattctcccaccgttatataaatcgcctccgctaagaaacgttagtatatccatacaatggaatacttcatttctaaaatagtattcgttttctaattctttaatgtgaaatcgtatactagaaagggaaaaattatctttgagttttccgttagaaaagaaccacgaaactaatgttctgattgcgtccgattccgttgctgaattaatggatttacaccaaaaactcatataacttctagatgtagaagcattcgctaaaaaattagtagaatcaaaggatataagtagatgttccaacaagtgagcaattcccaagatttcatctatatcattctcgaatccgaaattagaaattcccaagtagatatcctttttcatccgatcgttgatgaaaatacgaactttattcggtaagacaatcatttactaaggagtaaaataggaagtaatgttcgtatgtcgttatcatcgtataaattaaaggtgtgttttttaccattaagtgacattataattttaccaatattggaattataatataggtgtatttgcgcactcgcgacggttgatgcatcggtaaatatagctgtatctaatgttctagtcggtatttcatcatttcgctgtctaataatagcgttttctctatctgtttccattacagctgcctgaagtttattggtcggataatatgtaaaataataagaaatacatacgaataacaaaaataaaataagatataataaagatgccatttagagatctaattttgtttaacttgtccaaattcctacttacagaagatgaggaatcgttggagatagtgtcttccttatgtagaggatttgaaatatcttataatgacttgataacttactttccagataggaaataccataaatatatttataaagtatttgaacatgtagatttatcggaggaattaagtatggaattccatgatacaactctgagagatttagtctatcttagattgtacaagtattccaagtgtatacggccgtgttataaattaggagataatctaaaaggcatagttgttataaaggacaggaatatttatattagggaagcaaatgatgacttgatagaatatctcctcaaggaatacactcctcagatttatacatattctaatgagcgcgtccccataactggttcaaaattaattctttgtggattttctcaagttacatttatggcgtatacaacgtcgcatataacaacaaataaaaaggtagatgttctcgtttccaaaaaatgtatagatgaactagtcgatccaataaattatcaaatacttcaaaatttatttgataaaggaagcggaacaataaacaaaatactcaggaagatattttattcggtaacaggtggccaaactccataggtagctttttctatttcggattttagaatttccaaattcaccagcgatttatcggttttggtgaaatccaaggatttattaatgtccacaaatgccatttgttttgtctgtggattgtatttgaaaatggaaacgatgtagttagatagatgcgctgcgaagtttcctattagggttccgcgcttcacgtcacccagcatacttgaatcaccatcctttaaaaaaaatgataagatatcaacatggagtatatcatactcgaattttaattcttctactgactcactgacattttcacaaatactacaatacggtttaccgaaaataatcagtacgttcttcatttatgggtatcaaaaacttaaaatcgttactgctggaaaataaatcactgacgatattagatgataatttatacaaagtatacaatggaatatttgtggatacaatgagtatttatatagccgtcgccaattgtgtcagaaacttagaagagttaactacggtattcataaaatacgtaaacggatgggtaaaaaagggagggcatgtaaccctttttatcgatagaggaagtataaaaattaaacaagacgttagagacaagagacgtaaatattctaaattaaccaaggacagaaaaatgttagaattagaaaagtgtacatccgaaatacaaaatgttaccggatttatggaagaagaaataaaggcagaaatgcaattaaaaatcgataaactcacatttcaaatatatttatctgattctgataacataaaaatatcattgaatgagatactaacacatttcaacaataatgagaatgttacattattttattgtgatgaacgagacgcagaattcgttatgtgtctcgaggctaaaacacatttctctaccacaggagaatggccgttgataataagtaccgatcaggatactatgctatttgcatctgctgataatcatcctaagatgataaaaaacttaactcaactgtttaaatttgttccctcggcagaggataactatttagcaaaattaacggcgttagtgaatggatgtgatttctttcctggactctatggggcatctataacacccaccaacttaaacaaaatacaattgtttagtgattttacaatcgataatatagtcactagtttggcaattaaaaattattatagaaagactaactctaccgtagacgtgcgtaatattgttacgtttataaacgattacgctaatttagacgatgtctactcgtatattcctccttgtcaatgcactgttcaagaatttatattttccgcattagatgaaaaatggaatgaatttaaatcatcttatttagaaagcgtgccgttaccctgccaattaatgtacgcgttagaaccacgcaaggagattgatgtttcagaagttaaaactttatcatcttatatagatttcgaaaatactaaatcagatatcgatgttataaaatctatatcctcgatcttcggatattctaacgaaaactgtaacacgatagtattcggcatctataaggataatttactactgagtataaataattcattttactttaacgatagtctgttaataaccaatactaaaagtgataatataataaatataggttactagattaaaaatggtgttccaactcgtgtgctctacatgcggtaaagatatttctcacgaacgatataaattgattatacgaaaaaaatcattaaaggatgtactcgtcagtgtaaagaacgaatgttgtaggttaaaattatctacacaaatagaacctcaacgtaacttaacagtgcaacctctattggatataaactaatatggatccggttaattttatcaagacatatgcgcctagaggttctattatttttattaattataccatgtcattaacaagtcatttgaatccatcgatagaaaaacatgtgggtatttattatggtacgttattatcggaacacttggtagttgaatctacctatagaaaaggagttcgaatagtcccattggatagtttttttgaaggatatcttagtgcaaaagtatacatgttagagaatattcaagttatgaaaatagcagctgatacgtcattaactttattgggtattccgtatggatttggtcatgatagaatgtattgttttaaattggtagctgactgttataaaaatgccggtattgatacatcgtctaaacgaatattgggcaaagatatttttctgagccaaaacttcacagacgataatagatggataaagatatatgattctaataatttaacattttggcaaattgattaccttaaagggtgagttaatatgcataactactcctccgttgttttttccctcgttctttttcttaacgttgtttgccatcactctcataatgtaaagatattctaaaatggtaaacttttgcatatcggacgcagaaattggtataaatgttgtaattgtattatttcccgtcaatggactagtcacagctccatcagttttatatcctttagagtatttctcactcgtgtctaacattctagagcattccatgatctgtttatcgttgatattggccggaaagatagattttttattttttattatattactattggcaattgtagatataacttctggtaaatatttttctaccttttcaatctcttctattttcaagccggctatatattctgctatattgttgctagtatcaataccttttctggctaagaagtcatatgtggtattcactatatcagttttaactggtagttccattagcctttccacttctgcagaataatcagaaattggttctttaccagaaaatccagctactataataggctcaccgatgatcattggcaaaatcctatattgtaccagattaatgagagcatatttcatttccaataattctgctagttcttgagacattgatttatttgatgaatctagttggttctctagatactctaccatttctgccgcatacaataacttgttagataaaatcagggttatcaaagtgtttagcgtggctagaatagtgggcttgcatgtattaaagaatgcggtagtatgagtaaaccgttttaacgaattatatagtctccagaaatctgtggcgttacatacatgagccgaatgacatcgaagattgtccaatatttttaatagctgctctttgtccattatttctatatttgactcgcaacaattgtagataccattaatcaccgattcctttttcgatgccggacaatagcacaattgtttagctttggactctatgtattcagaattaatagatatatctctcaatacagattgcactatacattttgaaactatgtcaaaaattgtagaacgacgctgttctgcagccatttaactttaaataatttacaaaaatttaaaatgagcatccgtataaaaatcgataaactgcgccaaattgtggcatatttttcagagttcagtgaagaagtgtctataaatgtagactcgacggatgagttaatgtatatttttgccgccttgggcggatctgtaaacatttgggcaattatacctctaagtgcatcagtgttttaccgaggagccgaaaatattgtgtttaatcttcctgtgtccaaggtaaaatcgtgtttgtgtagttttcacaatgatgccatcatagatatagaacctgatctggaaaataatctagtaaaactttctagttatcatgtagtaagtgtcgattgtaacaaggaactgatgcctattaggacagatactactatttgtctaagtatagatcaaaagaaatcttacgtgtttaattttcacaagtatgaagaaaaatgttgtggtagaaccgtcattcatctagaatggttgttgggctttatcaagtgtattagtcagcatcagcatctggctattatgtttaaagatgacaatattattatgaagactcctggtaatactgatgcgttttccagggaatattctatgactgaatgttctcaagaactacaaaagttttctttcaaaatagctatctcgtctctcaacaaactacgaggattcaaaaagagagtcaatgtttttgaaactagaatcgtaatggataatgacgataacattttaggaatgttgttttcggatagagttcaatcctttaagatcaacatctttatggcgtttttagattaatactttcaatgagataaatatgggtggcggagtaagtgttgagctccctaaacgggatccgcctccgggagtacccactgatgagatgttattaaacgtggataaaatgcatgacgtgatagctcccgctaagcttttagaatatgtgcatataggaccactagcaaaagataaagaggataaagtaaagaaaagatatccagagtttagattagtcaacacaggacccggtggtctttcggcattgttaagacaatcgtataatggaaccgcacccaattgctgtcgcacttttaatcgtactcattattggaagaaggatggaaagatatcagataagtatgaagagggtgcagtattagaatcgtgttggccagacgttcacgacactggaaaatgcgatgttgatttattcgactggtgtcagggggatacgttcgatagaaacatatgccatcagtggatcggttcagcctttaataggagtaatagaactgtagagggtcaacaatcgttaataaatctgtataataagatgcaaacattatgtagtaaagatgctagtgtaccaatatgcgaatcatttttgcattatttacgcgcacacaatacagaagatagcaaagagatgatcgattatattctaagacaacagtctgcggactttaaacagaaatatatgagatgtagttatcccactagagataagttagaagagtcattaaaatatgcggaacctcgagaatgttgggatccagagtgttcgaatgccaatgttaatttcttactaacacgtaattataataatttaggactttgcaatattgtacgatgtaataccagcgtgaacaacttacagatggataaaacttcctcattaagattgtcatgtggattaagcaatagtgatagattttctactgttcccgtcaatagagcaaaagtagttcaacataatattaaacactcgttcgacctaaaattgcatttgatcagtttattatctctcttggtaatatggatactaattgtagctatttaaatgggtgccgcggcaagcatacagacgacggtgaatacactcagcgaacgtatctcgtctaaattagaacaagaagcgaacgctagtgctcaaacaaaatgtgatatagaaatcggaaatttttatatccgacaaaaccatggatgtaacctcactgttaaaaatatgtgctctgcggacgcggatgctcagttggatgctgtgttatcagccgctacagaaacatatagtggattaacaccggaacaaaaagcatacgtgccagctatgtttactgctgcgttaaacattcagacgagtgtaaacactgttgttagagattttgaaaattatgtgaaacagacttgtaattctagcgcggtcgtcgataacaaattaaagatacaaaacgtaatcatagatgaatgttacggagccccaggatctccaacaaatttggaatttattaatacaggatctagcaaaggaaattgtgccattaaagcgttgatgcaattgacgactaaggccactactcaaatagcacctagacaagttgctggtacaggagttcagttttatatgattgttatcggtgttataatattggcagcgttgtttatgtactatgccaagcgtatgttgttcacatccaccaatgataaaatcaaacttattttagccaataaggaaaacgtccattggactacttacatggacacattctttagaacttctccgatggttattgctaccacggatatgcaaaactgaaaatatattgataatattttaatagattaacatggaagttatcgctgatcgtctagacgatatagtgaaacaaaatatagcggatgaaaaatttgtagattttgttatacacggtctagagcatcaatgtcctgctatacttcgaccattaattaggttgtttattgatatactattatttgttatagtaatttatatttttacggtacgtctagtaagtagaaattatcaaatgttgttggtggtgctagtcatcacattaactattttttattactttatactataatagtactagactgacttctaacaaacatctcacctgccataaataaatgcttgatattaaagtcttctatttctaacactattccatctgtggaaaataatactctgacattatcgctaattgacacatcggtgagtgatatgcctataaagtaataatcttctttgggcacatataccagtgtaccaggttctaacaacctatttactggtgctcctgtagcatactttttctttaccttgagaatatccatcgtttgcttggtcaatagcgatatgtgattttttatcaaccactcaaaaaagtaattggagtgttcatatcctctacgggctattgtctcatggccgtgtatgaaatttaagtaacacgactgtggtagatttgttctatagagccgattgccgcaaatagatagaactaccaatatgtctgtacaaatgttaaacattaattgattaacagaaaaaacaatgttcgttctgggaatagaaaccagatcaaaacaaaattcgttagaatatatgccacgtttatacatggaatataaaataactacagtttgaaaaataacagtatcatttaaacatttaacttgcggggttaatctcacaactttactgtttttgaactgttcaaaatatagcatcgatccgtgagaaatacgtttagccgcctttaatagaggaaatcccaccgcctttctggatctcaccaacgacgatagttctgaccagcaactcatttcttcatcatccacctgttttaacatataataggcaggagatagatatccgtcattgcaatattccttctcgtaggcacacaatctaatattgataaaatctccattctcttctctgcatttattatcttgtctcggtggctgattaggctgtggtcttggtttaggccttggtctatcgttgttgaatctattttggtcattaaatctttcatttcttcctggtatatttctatcacctcgtttggttggatttttgtctatattatcgtttgtaacatcggtacgggtattcatttatcacaaaaaaaacttctctaaatgagtctactgctagaaaacctcatcgaagaagataccatattttttgcaggaagtatatctgagtatgatgatttacaaatggttattgccggcgcaaaatccaaatttccaagatctatgctttctatttttaatatagtacctagaacgatgtcaaaatatgagttggagttgattcataacgaaaatatcacaggagcaatgtttaccacaatgtataatataagaaacaatttgggtctaggagatgataaactaactattgaagccattgaaaactatttcttggatcctaacaatgaagttatgcctcttattattaataatacggatatgactgccgtcattcctaaaaaaagtggtaggagaaagaataagaacatggttatcttccgtcaaggatcatcacctatcttgtgcattttcgaaactcgtaaaaagattaatatttataaagaaaatatggaatccgcgtcgactgagtatacacctatcggagacaacaaggctttgatatctaaatatgcgggaattaatgtcctgaatgtgtattctccttccacatccataagattgaatgccatttacggattcaccaataaaaataaactagagaaacttagtactaataaggaactagaatcgtatagttctagccctcttcaagaacccattaggttaaatgattttctgggactattggaatgtgttaaaaagaatattcctctaacagatattccgacaaaggattgattactataaatggagaatgttcctaatgtatactttaatcctgtgtttatagagcccacgtttaaacattctttattaagtgtttataaacacagattaatagttttatttgaagtattcgttgtattcattctaatatatgtattttttagatctgaattaaatatgttcttcatgcctaaacgaaaaatacccgatcctattgatagattacgacgtgctaatctagcgtgtgaagacgataaattaatgatctatggattaccatggatgacaactcaaacatctgcgttatcaataaatagtaaaccgatagtgtataaagattgtgcaaagcttttgcgatcaataaatggatcacaaccagtatctcttaacgatgttcttcgcagatgatgattcattttttaagtatttggctagtcaagatgatgaatcttcattatctgatatattgcaaatcactcaatatctagactttctgttattattattgatccaatcaaaaaataaattagaagctgtgggtcattgttatgaatctctttcagaggaatacagacaattgacaaaattcacagactttcaagattttaaaaaactgtttaacaaggtccctattgttacagatggaagggtcaaacttaataaaggatatttgttcgactttgtgattagtttgatgcgattcaaaaaagaatcctctctagctaccaccgcaatagatcctgttagatacatagatcctcgtcgcaatatcgcattttctaacgtgatggatatattaaagtcgaataaagtgaacaataattaattctttattgtcatcatgaacggcggacatattcagttgataatcggccccatgttttcaggtaaaagtacagaattaattagacgagttagacgttatcaaatagctcaatataaatgcgtgactataaaatattctaacgataatagatacggaacgggactatggacgcatgataagaataattttgaagcattggaagcaactaaactatgtgatgtcttggaatcaattacagatttctccgtgataggtatcgatgaaggacagttctttccagacattgttgaattagatcgataaaaattaattaattacccgggtaccaggcctagatctgtcgagatccggtggtggtgcaaatcaaagaactgctcctcagtggatgttgcctttacttctaggcctgtacggaagtgttacttctgctctaaaagctgctgcagggggggggggggggtgggggggccggttagggccgccatcccctcagagcgtcgggatatcgggtggcggctcgggacggaggacgcgctagtgttcttctgtgtggcagttcagaatgatggatcaagctagatcagcattctctaacttgtttggtggagaaccattgtcatatacccggttcagcctggctcggcaagtagatggcgataacagtcatgtggagatgaaacttgctgtagatgaagaagaaaatgctgacaataacacaaaggccaatgtcacaaaaccaaaaaggtgtagtggaagtatctgctatgggactattgctgtgatcgtctttttcttgattggatttatgattggctacttgggctattgtaaaggggtagaaccaaaaactgagtgtgagagactggcaggaaccgagtctccagtgagggaggagccaggagaggacttccctgcagcacgtcgcttatattgggatgacctgaagagaaagttgtcggagaaactggacagcacagacttcaccagcaccatcaagctgctgaatgaaaattcatatgtccctcgtgaggctggatctcaaaaagatgaaaatcttgcgttgtatgttgaaaatcaatttcgtgaatttaaactcagcaaagtctggcgtgatcaacattttgttaagattcaggtcaaagacagcgctcaaaactcggtgatcatagttgataagaacggtagacttgtttacctggtggagaatcctgggggttatgtggcgtatagtaaggctgcaacagttactggtaaactggtccatgctaattttggtactaaaaaagattttgaggatttatacactcctgtgaatggatctatagtgattgtcagagcagggaaaatcacctttgcagaaaaggttgcaaatgctgaaagcttaaatgcaattggtgtgttgatatacatggaccagactaaatttcccattgttaacgcagaactttcattctttggacatgctcatctggggacaggtgacccttacacacctggattcccttccttcaatcacactcagtttccaccatctcggtcatcaggattgcctaatatacctgtccagacaatctccagagctgctgcagaaaagctgtttgggaatatggaaggagactgtccctctgactggaaaacagactctacatgtaggatggtaacctcagaaagcaagaatgtgaagctcactgtgagcaatgtgctgaaagagataaaaattcttaacatctttggagttattaaaggctttgtagaaccagatcactatgttgtagttggggcccagagagatgcatggggccctggagctgcaaaatccggtgtaggcacagctctcctattgaaacttgcccagatgttctcagatatggtcttaaaagatgggtttcagcccagcagaagcattatctttgccagttggagtgctggagactttggatcggttggtgccactgaatggctagagggatacctttcgtccctgcatttaaaggctttcacttatattaatctggataaagcggttcttggtaccagcaacttcaaggtttctgccagcccactgttgtatacgcttattgagaaaacaatgcaaaatgtgaagcatccggttactgggcaatttctatatcaggacagcaactgggccagcaaagttgagaaactcactttagacaatgctgctttccctttccttgcatattctggaatcccagcagtttctttctgtttttgcgaggacacagattatccttatttgggtaccaccatggacacctataaggaactgattgagaggattcctgagttgaacaaagtggcacgagcagctgcagaggtcgctggtcagttcgtgattaaactaacccatgatgttgaattgaacctggactatgagaggtacaacagccaactgctttcatttgtgagggatctgaaccaatacagagcagacataaaggaaatgggcctgagtttacagtggctgtattctgctcgtggagacttcttccgtgctacttccagactaacaacagatttcgggaatgctgagaaaacagacagatttgtcatgaagaaactcaatgatcgtgtcatgagagtggagtatcacttcctctctccctacgtatctccaaaagagtctcctttccgacatgtcttctggggctccggctctcacacgctgccagctttactggagaacttgaaactgcgtaaacaaaataacggtgcttttaatgaaacgctgttcagaaaccagttggctctagctacttggactattcagggagctgcaaatgccctctctggtgacgtttgggacattgacaatgagttttaaatgtgatacccatagcttccatgagaacagcagggtagtctggtttctagacttgtgctgatcgtgctaaattttcagtagggctacaaaacctgatgttaaaattccatcccatcatcttggtactactagatgtctttaggcagcagcttttaatacagggtagataacctgtacttcaagttaaagtgaataaccacttaaaaaatgtccatgatggaatattcccctatctctagaattttaagtgctttgtaatgggaactgcctctttcctgttgttgttaatgaaaatgtcagaaaccagttatgtgaatgatctctctgaatcctaagggctggtctctgctgaaggttgtaagtggtcgcttactttgagtgatcctccaacttcatttgatgctaaataggagataccaggttgaaagaccttctccaaatgagatctaagcctttccataaggaatgtagctggtttcctcattcctgaaagaaacagttaactttcagaagagatgggcttgttttcttgccaatgaggtctgaaatggaggtccttctgctggataaaatgaggttcaactgttgattgcaggaataaggccttaatatgttaacctcagtgtcatttatgaaaagaggggaccagaagccaaagacttagtatattttcttttcctctgtcccttcccccataagcctccatttagttctttgttatttttgtttcttccaaagcacattgaaagagaaccagtttcaggtgtttagttgcagactcagtttgtcagactttaaagaataatatgctgccaaattttggccaaagtgttaatcttaggggagagctttctgtccttttggcactgagatatttattgtttatttatcagtgacagagttcactataaatggtgtttttttaatagaatataattatcggaagcagtgccttccataattatgacagttatactgtcggttttttttaaataaaagcagcatctgctaataaaacccaacagatactggaagttttgcatttatggtcaacacttaagggttttagaaaacagccgtcagccaaatgtaattgaataaagttgaagctaagatttagagatgaattaaatttaattaggggttgctaagaagcgagcactgaccagataagaatgctggttttcctaaatgcagtgaattgtgaccaagttataaatcaatgtcacttaaaggctgtggtagtactcctgcaaaattttatagctcagtttatccaaggtgtaactctaattcccattttgcaaaatttccagtacctttgtcacaatcctaacacattatcgggagcagtatcttccataatgtataaagaacaaggtagtttttacctaccacagtgtctgtatcggagacagtgatctccatatgttacactaagggtgtaagtaattatcgggaacagtgtttcccataattttcttcatgcaatgacatcttcaaagcttgaagatcgttagtatctaacatgtatcccaactcctataattccctatcttttagttttagttgcagaaacattttgtggtcattaagcattgggtgggtaaattcaaccactgtaaaatgaaattactacaaaatttgaaatttagcttgggtttttgttacctttatggtttctccaggtcctctacttaatgagatagtagcatacatttataatgtttgctattgacaagtcattttaactttatcacattatttgcatgttacctcctataaacttagtgcggacaagttttaatccagaattgaccttttgacttaaagcagagggactttgtatagaaggtttgggggctgtggggaaggagagtcccctgaaggtctgacacgtctgcctacccattcgtggtgatcaattaaatgtaggtatgaataagttcgaagctccgtgagtgaaccatcattataaacgtgatgatcagctgtttgtcatagggcagttggaaacggcctcctagggaaaagttcatagggtctcttcaggttcttagtgtcacttacctagatttacagcctcacttgaatgtgtcactactcacagtctctttaatcttcagttttatctttaatctcctcttttatcttggactgacatttagcgtagctaagtgaaaaggtcatagctgagattcctggttcgggtgttacgcacacgtacttaaatgaaagcatgtggcatgttcatcgtataacacaatatgaatacagggcatgcattttgcagcagtgagtctcttcagaaaacccttttctacagttagggttgagttacttcctatcaagccagtacgtgctaacaggctcaatattcctgaatgaaatatcagactagtgacaagctcctggtcttgagatgtcttctcgttaaggagatgggccttttggaggtaaaggataaaatgaatgagttctgtcatgattcactattctagaacttgcatgacctttactgtgttagctctttgaatgttcttgaaattttagactttctttgtaaacaaatgatatgtccttatcattgtataaaagctgttatgtgcaacagtgtggagattccttgtctgatttaataaaatacttaaacactgaaaaaaaaaaaaaaaaaaaaaaaaaaaaaaaaaaaaaaaaaaaaaaaaaaaaaaaaaaaaaaaaaaaaaaaaaaaaaaaaagtaccttctgaggcggaaagaaccagccggatctcgacttcgagcttatttatattccaaaaaaaaaaaataaaatttcaatttttaagctttcactaattccaaacccacccgctttttatagtaagtttttcacccataaataataaatacaataattaatttctcgtaaaagtagaaaatatattctaatttattgcacggtaaggaagtagatcataactcgagcatgggagatcccgtcgttttacaacgtcgtgactgggaaaaccctggcgttacccaacttaatcgccttgcagcacatccccctttcgccagctggcgtaatagcgaagaggcccgcaccgatcgcccttcccaacagttgcgcagcctgaatggcgaatggcgctttgcctggtttccggcaccagaagcggtgccggaaagctggctggagtgcgatcttcctgaggccgatactgtcgtcgtcccctcaaactggcagatgcacggttacgatgcgcccatctacaccaacgtgacctatcccattacggtcaatccgccgtttgttcccacggagaatccgacgggttgttactcgctcacatttaatgttgatgaaagctggctacaggaaggccagacgcgaattatttttgatggcgttaactcggcgtttcatctgtggtgcaacgggcgctgggtcggttacggccaggacagtcgtttgccgtctgaatttgacctgagcgcatttttacgcgccggagaaaaccgcctcgcggtgatggtgctgcgctggagtgacggcagttatctggaagatcaggatatgtggcggatgagcggcattttccgtgacgtctcgttgctgcataaaccgactacacaaatcagcgatttccatgttgccactcgctttaatgatgatttcagccgcgctgtactggaggctgaagttcagatgtgcggcgagttgcgtgactacctacgggtaacagtttctttatggcagggtgaaacgcaggtcgccagcggcaccgcgcctttcggcggtgaaattatcgatgagcgtggtggttatgccgatcgcgtcacactacgtctgaacgtcgaaaacccgaaactgtggagcgccgaaatcccgaatctctatcgtgcggtggttgaactgcacaccgccgacggcacgctgattgaagcagaagcctgcgatgtcggtttccgcgaggtgcggattgaaaatggtctgctgctgctgaacggcaagccgttgctgattcgaggcgttaaccgtcacgagcatcatcctctgcatggtcaggtcatggatgagcagacgatggtgcaggatatcctgctgatgaagcagaacaactttaacgccgtgcgctgttcgcattatccgaaccatccgctgtggtacacgctgtgcgaccgctacggcctgtatgtggtggatgaagccaatattgaaacccacggcatggtgccaatgaatcgtctgaccgatgatccgcgctggctaccggcgatgagcgaacgcgtaacgcgaatggtgcagcgcgatcgtaatcacccgagtgtgatcatctggtcgctggggaatgaatcaggccacggcgctaatcacgacgcgctgtatcgctggatcaaatctgtcgatccttcccgcccggtgcagtatgaaggcggcggagccgacaccacggccaccgatattatttgcccgatgtacgcgcgcgtggatgaagaccagcccttcccggctgtgccgaaatggtccatcaaaaaatggctttcgctacctggagagacgcgcccgctgatcctttgcgaatacgcccacgcgatgggtaacagtcttggcggtttcgctaaatactggcaggcgtttcgtcagtatccccgtttacagggcggcttcgtctgggactgggtggatcagtcgctgattaaatatgatgaaaacggcaacccgtggtcggcttacggcggtgattttggcgatacgccgaacgatcgccagttctgtatgaacggtctggtctttgccgaccgcacgccgcatccagcgctgacggaagcaaaacaccagcagcagtttttccagttccgtttatccgggcaaaccatcgaagtgaccagcgaatacctgttccgtcatagcgataacgagctcctgcactggatggtggcgctggatggtaagccgctggcaagcggtgaagtgcctctggatgtcgctccacaaggtaaacagttgattgaactgcctgaactaccgcagccggagagcgccgggcaactctggctcacagtacgcgtagtgcaaccgaacgcgaccgcatggtcagaagccgggcacatcagcgcctggcagcagtggcgtctggcggaaaacctcagtgtgacgctccccgccgcgtcccacgccatcccgcatctgaccaccagcgaaatggatttttgcatcgagctgggtaataagcgttggcaatttaaccgccagtcaggctttctttcacagatgtggattggcgataaaaaacaactgctgacgccgctgcgcgatcagttcacccgtgcaccgctggataacgacattggcgtaagtgaagcgacccgcattgaccctaacgcctgggtcgaacgctggaaggcggcgggccattaccaggccgaagcagcgttgttgcagtgcacggcagatacacttgctgatgcggtgctgattacgaccgctcacgcgtggcagcatcaggggaaaaccttatttatcagccggaaaacctaccggattgatggtagtggtcaaatggcgattaccgttgatgttgaagtggcgagcgatacaccgcatccggcgcggattggcctgaactgccagctggcgcaggtagcagagcgggtaaactggctcggattagggccgcaagaaaactatcccgaccgccttactgccgcctgttttgaccgctgggatctgccattgtcagacatgtataccccgtacgtcttcccgagcgaaaacggtctgcgctgcgggacgcgcgaattgaattatggcccacaccagtggcgcggcgacttccagttcaacatcagccgctacagtcaacagcaactgatggaaaccagccatcgccatctgctgcacgcggaagaaggcacatggctgaatatcgacggtttccatatggggattggtggcgacgactcctggagcccgtcagtatcggcggaattccagctgagcgccggtcgctaccattaccagttggtctggtgtcaaaaataataataaccgggcaggggggatccaattctgtgagcgtatggcaaacgaaggaaaaatagttatagtagccgcactcgatgggacatttcaacgtaaaccgtttaataatattttgaatcttattccattatctgaaatggtggtaaaactaactgctgtgtgtatgaaatgctttaaggaggcttccttttctaaacgattgggtgaggaaaccgagatagaaataataggaggtaatgatatgtatcaatcggtgtgtagaaagtgttacatcgactcataatattatattttttatctaaaaaactaaaaataaacattgattaaattttaatataatacttaaaaatggatgttgtgtcgttagataaaccgtttatgtattttgaggaaattgataatgagttagattacgaaccagaaagtgcaaatgaggtcgcaaaaaaactgccgtatcaaggacagttaaaactattactaggagaattattttttcttagtaagttacagcgacacggtatattagatggtgccaccgtagtgtatataggatctgctcccggtacacatatacgttatttgagagatcatttctataatttaggagtgatcatcaaatggatgctaattgacggccgccatcatgatcctattttaaatggattgcgtgatgtgactctagtgactcggttcgttgatgaggaatatctacgatccatcaaaaaacaactgcatccttctaagattattttaatttctgatgtgagatccaaacgaggaggaaatgaacctagtacggcggatttactaagtaattacgctctacaaaatgtcatgattagtattttaaaccccgtggcgtctagtcttaaatggagatgcccgtttccagatcaatggatcaaggacttttatatcccacacggtaataaaatgttacaaccttttgctccttcatattcagctgaaatgagattattaagtatttataccggtgagaacatgagactgactcgagttaccaaattagacgctgtaaattatgaaaaaaagatgtactaccttaataagatcgtccgtaacaaagtagttgttaactttgattatcctaatcaggaatatgactattttcacatgtactttatgctgaggaccgtgtactgcaataaaacatttcctactactaaagcaaaggtactatttctacaacaatctatatttcgtttcttaaatattccaacaacatcaactgaaaaagttagtcatgaaccaatacaacgtaaaatatctagcaaaaattctatgtctaaaaacagaaatagcaagagatccgtacgcggtaataaatagaaacgtactactgagatatactaccgatatagagtataatgatttagttactttaataaccgttagacataaaattgattctatgaaaactgtgtttcaggtatttaacgaatcatccataaattatactccggttgatgatgattatggagaaccaatcattataacatcgtatcttcaaaaaggtcataacaagtttcctgtaaattttctatacatagatgtggtaatatctgacttatttcctagctttgttagactagatactacagaaactaatatagttaatagtgtactacaaacaggcgatggtaaaaagactcttcgtcttcccaaaatgttagagacggaaatagttgtcaagattctctatcgccctaatataccattaaaaattgttagatttttccgcaataacatggtaactggagtagagatagccgatagatctgttatttcagtcgctgattaatcaattagtagagatgagataagaacattataataatcaataatatatcttatatcttatatcttatatcttatatcttgtttagaaaaatgctaatattaaaatagctaacgctagtaatccaatcggaagccatttgatatctataatagggtatctaatttcctgatttaaatagcggacagctatattctcggtagctactcgtttggaatcacaaacattatttacatctaatttactatctgtaatggaaacgtttcccaatgaaatggtacaatccgatacattgcattttgttatatttttttttaaagaggctggtaacaacgcatcgcttcgtttacatggctcgtaccaacaataatagggtaatcttgtatctattcctatccgtactatgcttttatcaggataaatacatttacatcgtatatcgtctttgttagcatcacagaatgcataaatttgttcgtccgtcatgataaaaatttaaagtgtaaatataactattatttttatagttgtaataaaaagggaaatttgattgtatactttcggttctttaaaagaaactgacttgataaaaatggctgtaatctctaaggttacgtatagtctatatgatcaaaaagagattaatgctacagatattatcattagtcatgttaaaaatgacgacgatatcggtaccgttaaagatggtagactaggtgctatggatggggcattatgtaagacttgtgggaaaacggaattggaatgtttcggtcactggggtaaagtaagtatttataaaactcatatagttaagcctgaatttatttcagaaattattcgtttactgaatcatatatgtattcactgcggattattgcgttcacgagaaccgtattccgacgatattaacctaaaagagttatcgggacacgctcttaggagattaaaggataaaatattatccaagaaaaagtcatgttggaacagtgaatgtatgcaaccgtatcaaaaaattactttttcaaagaaaaaggtttgtttcgtcaacaagttggatgatattaacgttcctaattctctcatctatcaaaagttaatttctattcatgaaaagttttggccattattagaaattcatcaatatccagctaacttattttatacagactactttcccatccctccgttgattattagaccggctattagtttttggatagatagtatacccaaagagaccaatgaattaacttacttattaggtatgatcgttaagaattgtaacttgaatgctgatgaacaggttatccagaaggcggtaatagaatacgatgatattaaaattatttctaataacactaccagtatcaatttatcatatattacatccggcaaaaataatatgattagaagttatatcgtcgcccgacgaaaagatcagaccgctagatctgtaattggtcccagtacatctatcaccgttaatgaggtaggaatgcccgcatatattagaaatacacttacagaaaagatatttgttaatgcctttacagtggataaagttaaacaactattagcgtcaaaccaagttaaattttactttaataaacgattaaaccaattaacaagaatacgccaaggaaagtttattaaaaataaaatacatttattgcctggtgattgggtagaagtagctgttcaagaatatacaagtattatttttggaagacagccgtctctacatagatacaacgtcatcgcttcatctatcagagctaccgaaggagatactatcaaaatatctcccggaattgccaactctcaaaatgctgatttcgacggggatgaggaatggatgatattagaacaaaatcctaaagctgtaattgaacaaagtattcttatgtatccgacgacgttactcaaacacgatattcatggagcccccgtttatggatctattcaagatgaaatcgtagcagcgtattcattgtttaggatacaagatctttgtttagatgaagtattgaacatcttggggaaatatggaagagagttcgatcctaaaggtaaatgtaaattcagcggtaaagatatctatacttacttgataggtgaaaagattaattatccgggtctcttaaaggatggtgaaattattgcaaacgacgtagatagtaattttgttgtggctatgaggcatctgtcattggctggactcttatccgatcataagtcgaacgtggaaggtatcaactttattatcaagtcatcttatgtttttaagagatatctatctatttacggttttggggtgacattcaaagatctgagaccaaattcgacgttcactaataaattggaggccatcaacgtagaaaaaatagaacttatcaaagaagcatacgccaaatatctcaacgatgtaagagacgggaaaatagttccattatctaaagctttagaggcggactatgtggaatccatgttatccaacttgacaaatcttaatatccgagagatagaagaacatatgagacaaacgctgatagatgatccagataataacctcctgaaaatggccaaagcgggttataaagtaaatcccacagaactaatgtatattctaggtacgtatggacaacaaaggattgatggtgaaccagcagagactcgagtattgggtagagttttaccttactatcttccagactctaaggatccagaaggaagaggttacattcttaattctttaacaaaaggattaacgggttctcaatattacttttcgatgctggttgccagatctcaatctactgatatcgtctgtgaaacatcacgtaccggaacactggctagaaaaatcattaaaaagatggaggatatggtggtcgacggatacggacaagtagttataggtaatacgctcatcaagtacgccgccaattataccaaaattctaggctcagtatgtaaacctgtagatcttatctatccagatgagtccatgacttggtatttggaaattagtgctctgtggaataaaataaaacagggattcgtttactctcagaaacagaaacttgcaaagaagacattggcgccgtttaatttcctagtattcgtcaaacccaccactgaggataatgctattaaggttaaggatctgtacgatatgattcataacgtcattgatgatgtgagagagaaatacttctttacggtatctaatatagattttatggagtatatattcttgacgcatcttaatccttctagaattagaattacaaaagaaacggctatcactatctttgaaaagttctatgaaaaactcaattatactctaggtggtggaactcctattggaattatttctgcacaggtattgtctgagaagtttacacaacaagccctgtccagttttcacactactgaaaaaagtggtgccgtcaaacaaaaacttggtttcaacgagtttaataacttgactaatttgagtaagaataagaccgaaattatcactctggtatccgatgatatctctaaacttcaatctgttaagattaatttcgaatttgtatgtttgggagaattaaatccaaacatcactcttcgaaaagaaacagataaatatgtagtagatataatagtcaatagattatacatcaagagagcagaaataaccgaattagtcgtcgaatatatgattgaacgatttatctcctttagcgtcattgtaaaggaatggggtatggagacattcattgaggacgaggataatattagatttactgtctacctaaatttcgttgaaccggaagaattgaatcttagtaagtttatgatggttcttccgggggcagccaacaagggaaagattagtaaattcaagattcctatctctgattatacgggatatgacgacttcaatcaaacaaaaaagctcaataagatgactgtagaactcatgaatctaaaagaattgggttctttcgatttggaaaacgtcaacgtgtatcctggagtatggaatacatacgatatcttcggtatcgaggccgctcgtgaatacttgtgcgaagccatgttaaacacctatggagaagggttcgattatctgtatcagccttgtgatcttctcgctagtttactatgtgctagttacgaaccagaatcagtgaataaattcaagttcggcgcagctagtactcttaagagagctacgttcggagacaataaagcattgttaaacgcggctcttcataaaaagtcagaacctattaacgataatagtagctgccacttttttagcaaggtccctaatataggaactggatattacaaatactttatcgacttgggtcttctcatgagaatggaaaggaaactatctgataagatatcttctcaaaagatcaaggaaatggaagaaacagaagacttttaattcttatcaataacatatttttctatgatctgtcttttaaacgatggattttccacaaatgcgcctctcaagtccctcatagaatgatacacgtataaaaaatatagcataggcaatgactccttatttttagacattagatatgccaaaatcatagccccgcttctatttactcccgcagcacaatgaaccaacacgggctcgtttcgttgatcacatttagataaaaaggcggttacgtcgtcaaaatatttactaatatcggtagttgtatcatctaccaacggtatatgaataatattaatattagagttaggtaatgtatatttatccatcgtcaaatttaaaacatatttgaacttaacttcagatgatggtgcatccatagcatttttataatttcccaaatacacattattggttacccttgtcattatagtgggagatttggctttgtgcatatctccagttgaacgtagtagtaagtatttatacaaacttttcttatccatttataacgtacaaatggataaaactactttatcggtaaacgcgtgtaatttagaatacgttagagaaaaggctatagtaggcgtacaagcagccaaaacatcaacacttatattctttgttattatattggcaattagtgcgctattactctggtttcagacgtctgataatccagtctttaatgaattaacgagatatatgcgaattaaaaatacggttaacgattggaaatcattaacggatagcaaaacaaaattagaaagtgatagaggtagacttctagccgctggtaaggatgatatatttgaattcaaatgtgtggatttcggcgcctattttatagctatgcgattggataagaaaacatatctgccgcaagctattaggcgaggtactggagacgcgtggatggttaaaaaggcggcaaaggtcgatccatctgctcaacaattttgtcagtatttgataaaacacaagtctaataatgttattacttgtggtaatgagatgttaaatgaattaggttatagcggttattttatgtcaccgcattggtgttccgattttagtaatatggaatagtgttagataaatgcggtaacgaatgttcctgtaaggaaccataacagcttagatttaacgttaaagatgagcataaacataataaacaaaattacaatcaaacttataacattaatatcaaacaatccaaaaaatgaaatcagtggagtagtaaacgcgtacataactcctggataacgtttagcagctgccgttcctattctagaccaaaaattcggtttcatgttttcgaaacggtattctgcaacaagtcgaggatcgtgttctacatatttggcggcattatccagtatctgcctattgatcttcatttcgttttcgattctggctatttcaaaataaaatcccgatgatagacctccagactttataatttcatctacgatgttcagcgccgtagtaactctaataatataggctgataagctaacatcataccctcctgtatatgtgaatatggcatgatttttgtccattacaagctcggttttaactttattgcctgtaataatttctctcatctgtaggatatctatttttttgtcatgcattgccttcaagacgggacgaagaaacgtaatatcctcaataacgttatcgttttctacaataactacatattctacctttttattttctaactcggtaaaaaaattagaatcccatagggctaaatgtctagcgatatttcttttcgtttcctctgtacacatagtgttacaaaaccctgaaaagaagtgagtatacttgtcatcatttctaatgtttcctccagtccactgtataaacgcataatccttgtaatgatctggatcatccttgactaccacaacatttcttttttctggcataacttcgttgtcctttacatcatcgaacttctgatcattaatatgctcatgaacattaggaaatgtttctgatggaggtctatcaataactggcacaacaataacaggagttttcaccgccgccatttagttattgaaattaatcatatacaactctttaatacgagttatattttcgtctatccattgtttcacattgacatatttcgacaaaaagatataaaatgcgtattccaatgcttctctgtttaatgaattactaaaatatacaaacacgtcactgtctggcaataaatgatatcttagaatattgtaacaatttattttgtattgcacatgttcgtgatctatgagttcttcttcgaatggcataggatctccgaatctgaaaacgtataaataggagttagaataataatatttgagagtattggtaatatataaactctttagcggtataattagtttttttctctcaatttctatttttagatgtgatggaaaaatgactaattttgtagcattagtatcatgaactctaatcaaaatcttaatatcttcgtcacacgttagctctttgaagtttttaagagatgcatcagttggttctacagatggagtaggtgcaacaattttttgttctacacatgtatgtactggagccattgttttaactataatggtgcttgtatcgaaaaactttaatgcagatagcggaagctcttcgccgcgactttctacgtcgtaattgggttctaacgccgatctctgaatggatactagttttctaagttctaatgtgattctctgaaaatgtaaatccaattcctccggcattatagatgtgtatacatcggtaaataaaactatagtatccaacgatcccttctcgcaaattctagtcttaaccaaaaaatcgtatataaccacggagatggcgtatttaagagtggattcttctaccgttttgttcttggatgtcatataggaaactataaagtccgcactactgttaagaatgattactaacgcaactatatagtttaaattaagcattttggaaacataaaataactctgtagacgatacttgactttcgaataagtttgcagacaaacgaagaaagaacagacctctcttaatttcagaagaaaactttttttcgtattcctgacgtctagagtttatatcaataagaaagttaagaattagtcggttaatgttgtatttcattacccaagtttgagatttcataatattatcaaaagacatgataatattaaagataaagcgctgactatgaacgaaatagctatatggttcgctcaagaatatagtcttgttaaacgtggaaacgataactgtatttttaatcacgtcagcggcatctaaattaaatataggtatatttattccacacactctacaatatgccacaccatcttcataataaataaattcgttagcaaaattattaattttagtgaaatagttagcgtcaactttcatagcttccttcaatctaatttgatgctcacacggtgcgaattccactctaacatcccttttccatgcctcaggttcatcgatctctataatatctagttttttgcgtttcacaaacacaggctcgtctctcgcgatgagatctgtatagtaactatgtaaatgataactagatagaaagatgtagctatatagatgacgatcctttaagagaggtataataactttaccccaatcagatagactgttgttatggtcttcggaaaaagaatttttataaatttttccagtattttccaaatatacgtacttaacatctaaaaaatccttaatgataataggaatggataatccgtctattttataaagaaatacatatcgcacattatacttttttttggaaatgggaataccgatgtgtctacataaatatgcaaagtctaaatattttttagagaatcttagttggtccaaattcttttccaagtacggtaatagatttttcatattgaacggtatcttcttaatctctggttctagttccgcattaaatgatgaaactaagtcactatttttataactaacgattacatcacctctaacatcatcatttaccagaatactgatcttcttttgtcgtaaatacatgtctaatgtgttaaaaaaaagatcatacaagttatacgtcatttcatctgtggtattcttgtcattgaaggataaactcgtactaatctcttctttaacagcctgttcaaatttatatcctatatacgaaaaaatagcaaccagtgtttgatcatccgcgtcaatattctgttctatcgtagtgtataacaatcgtatatcttcttctgtgatagtcgatacgttataaaggttgataacgaaaatatttttatttcgtgaaataaagtcatcgtaggattttggacttatattcgcgtctagtagatatgcttttatttttggaatgatctcaattagaatagtctctttagagtccatttaaagttacaaacaactaggaaattggtttatgatgtataatttttttagtttttatagattctttattctatacttaaaaaatgaaaataaatacaaaggttcttgagggttgtgttaaattgaaagcgagaaataatcataaattatttcattatcgcgatatccgttaagtttgtatcgtaatggcgtggtcaattacgaataaagcggatactagtagcttcacaaagatggctgaaatcagagctcatctaaaaaatagcgctgaaaataaagataaaaacgaggatattttcccggaagatgtaataattccatctactaagcccaaaaccaaacgagccactactcctcgtaaaccagcggctactaaaagatcaaccaaaaaggaggaagtggaagaagaagtagttatagaggaatatcatcaaacaactgaaaaaaattctccatctcctggagtcagcgacattgtagaaagcgtggccgctgtagagctcgatgatagcgacggggatgatgaacctatggtacaagttgaagctggtaaagtaaatcatagtgctagaagcgatctctctgacctaaaggtggctaccgacaatatcgttaaagatcttaagaaaattattactagaatctctgcagtatcgacggttctagaggatgttcaagcagctggtatctctagacaatttacttctatgactaaagctattacaacactatctgatctagtcaccgagggaaaatctaaagttgttcgtaaaaaagttaaaacttgtaagaagtaaatgcgtgcacttttttataaagatggtaaactctttaccgataataattttttaaatcctgtatcagacgataatccagcgtatgaggttttgcaacatgttaaaattcctactcatttaacagatgtagtagtatatgaacaaacgtgggaggaggcgttaactagattaatttttgtgggaagtgattcaaaaggacgtagacaatacttttacggaaaaatgcatgtacagaatcgcaacgctaaaagagatcgtatttttgttagagtatataacgttatgaaacgaattaattgttttataaacaaaaatataaagaaatcgtccacagattccaattatcagttggcggtttttatgttaatggaaactatgttttttattagatttggtaaaatgaaatatcttaaggagaatgaaacagtagggttattaacactaaaaaataaacacatagaaataagtcccgatgaaatagttatcaagtttgtaggaaaggacaaagtttcacatgaatttgttgttcataagtctaatagactatataaaccgctattgaaactgacggatgattctagtcccgaagaatttctgttcaacaaactaagtgaacgaaaggtatacgaatgtatcaaacagtttggtattagaatcaaggatctccgaacgtatggagtcaattatacgtttttatataatttttggacaaatgtaaagtccatatctcctcttccgtcaccaaaaaagttaatagcattaactatcaaacaaactgctgaagtggtaggtcatactccatcaatttcaaaaagagcttatatggcaacgactattttagaaatggtaaaggataaaaattttttagatgtagtatctaaaactacgttcgatgaattcctatctatagtcgtagatcacgttaaatcatctacggatggatgatatagatctttacacaaataattacaagaccgataaatggaaatggataagcgtatgaaatctctcgcaatgacagctttcttcggagagctaagcacattagatattatggcattgataatgtctatatttaaacgccatccaaacaataccattttttcagtggataaggatggtcagtttatgattgatttcgaatacgataattataaggcttctcaatatttggatctgaccctcactccgatatctggagatgaatgcaagactcacgcatcgagtatagccgaacaattggcgtgtgcggatattattaaagaggatattagcgaatatatcaaaactactccccgtcttaaacgatttataaaaaaataccgcaatagatcagatactcgtatcagtcgagatacagaaaagcttaaaatagctctagctaaaggcatagattacgaatatataaaagacgcttgttaataagtaaatgaaaaaaaactagtcgtttataataaaacacgatatggatgccaacgtagtatcattttctactattgcgacgtatatagacgctttagcgaagaatgcttcggaattagaacagaggtctaccgcatacgaaataaataatgaattggaactagtatttattaagccgccattgattactttgacaaatgtagtgaatatctctacgattcaggaatcgtttattcgatttaccgttactaataaggaaggtgttaaaattagaactaagattccattatctaaggtacatggtctagatgtaaaaaatgtacagttagtagatgctatagataacatagtttgggaaaagaaatcattagtgacggaaaatcgtcttcacaaagaatgcttgttgagactatcgacagaggaacgtcatatatttttggattacaagaaatatggatcctctatccgactagaattagtcaatcttattcaagcaaaaacaaaaaactttacgatagactttaagctaaaatattttctaggatccggtgcccagtctaaaagttctttgttgcacgctattaatcatccaaagtcaaggcctaatacatctctggaaatagaattcacacctagagacaatgaaacagttccatatgatgaactaataaaggaattgacgactctctcgcgtcatatatttatggcttctccagagaatgtaattctttctccgcctattaacgcgcctataaaaacctttatgttgcctaaacaagatatagtaggtttggatctggaaaatctatatgccgtaactaagactgacggcattcctataactatcagagttacatcaaacgggttgtattgttattttacacatcttggttatattattagatatcctgttaagagaataatagattccgaagtagtagtctttggtgaggcagttaaggataagaactggaccgtatatctcattaagctaatagagcctgtgaatgcaatcaatgatagactagaagaaagtaagtatgttgaatctaaactagtggatatttgtgatcggatagtattcaagtcaaagaaatacgaaggtccgtttactacaactagtgaagtcgtcgatatgttatctacatatttaccaaagcaaccagaaggtgttattctgttctattcaaagggacctaaatctaacattgattttaaaattaaaaaggaaaatactatagaccaaactgcaaatgtagtatttaggtacatgtccagtgaaccaattatctttggagaatcgtctatctttgtagagtataagaaatttagcaacgataaaggctttcctaaagaatatggttctggtaagattgtgttatataacggcgttaattatctaaataatatctattgtttggaatatattaatacacataatgaagtgggtattaagtccgtggttgtacctattaagtttatagcagaattcttagttaatggagaaatacttaaacctagaattgataaaaccatgaaatatattaactcagaagattattatggaaatcaacataatatcatagtcgaacatttaagagatcaaagcatcaaaataggagatatctttaacgaggataaactatcggatgtgggacatcaatacgccaataatgataaatttagattaaatccagaagttagttattttacgaataaacgaactagaggaccgttgggaattttatcaaactacgtcaagactcttcttatttctatgtattgttccaaaacatttttagacgattccaacaaacgaaaggtattggcgattgattttggaaacggtgctgacctggaaaaatacttttatggagagattgcgttattggtagcgacggatccggatgctgatgctatagctagaggaaatgaaagatacaacaaattaaactctggaattaaaaccaagtactacaaatttgactacattcaggaaactattcgatccgatacatttgtctctagtgtcagagaagtattctattttggaaagtttaatatcatcgactggcagtttgctatccattattcttttcatccgagacattatgctaccgtcatgaataacttatccgaactaactgcttctggaggcaaggtattaatcactaccatggacggagacaaattatcaaaattaacagataaaaagacttttataattcataagaatttacctagtagcgaaaactatatgtctgtagaaaaaatagctgatgatagaatagtggtatataatccatcaacaatgtctactccaatgactgaatacattatcaaaaagaacgatatagtcagagtgtttaacgaatacggatttgttcttgtagataacgttgatttcgctacaattatagaacgaagtaaaaagtttattaatggcgcatctacaatggaagatagaccgtctacaaaaaactttttcgaactaaatagaggagccattaaatgtgaaggtttagatgtcgaagacttacttagttactatgttgtttatgtcttttctaagcggtaaataataatatggtatgggttctgatctcccagttctaaatgcattaaataattccaatagagcgatttttgttcctataggaccttccaactgtggatactctgtattgttaatagatatattaatacttttgtcgggtaacagaggttctacgtcttctaaaaataaaagttttataacatctggcctgttcataaataaaaacttggcgattctatatatactcttattatcaaatctagccattgtcttatagatgtgagctactgtaggtgtaccatttgattttctttctaatactatatatttctctcgaagaagttcttgcacatcatctgggaataaaatactactgttgagtaaatcagttattttttttatatcgatattgatggacatttttatagttaaggataataagtatcccaaagtcgataacgacgataacgaagtatttatacttttaggaaatcacaatgactttatcagattaaaattaacaaaattaaaggagcatgtatttttttctgaatatattgtgactccagatacatatggatctttatgcgtcgaattaaatgggtctagttttcagcacggcggtagatatatagaggtggaggaatttatagatgctggaagacaagttagatggtgttctacatccaatcatatatctaaagatatacccgaagatatgcacactgataaatttgtcatttatgatatttatacgtttgattcgttcaagaataaacgattggtattcgtacaggtacctccgtcgttaggagatgatagtcatttgactaatccgttattgtcaccgtattatcgtaattcagtagccagacaaatggtcaatgatatgatttttaatcaagattcatttttaaaatatttattagaacatctgattagaagccactatagagtttctaaacatataacaatagttagatacaaggataccgaagaattaaatctaacgagaatatgttataatagagataagtttaaggcgtttgtattcgcttggtttaacggcgtttcggaaaatgaaaaggtactagatacgtataaaaaggtatctaatttgatataatgaattcagtgactgtatcacacgcgccatatactattacttatcacgatgattgggaaccagtaatgagtcaattggtagagttttataacgaagtagccagttggctgctacgagacgagacgtcgcctattcctgataagttctttatacagttgaaacaaccgcttagaaataaacgagtatgtgtgtgtggtatagatccgtatccgaaagatggaactggtgtaccgttcgaatcaccaaattttacaaaaaaatcaattaaggagatagcttcatctatatctagattaaccggagtaattgattataaaggttataaccttaatataatagacggggttataccctggaattattacttaagttgtaaattaggagaaacaaaaagtcacgcgatttactgggataagatttccaagttactgctgcagcatataactaaacacgttagtgttctttattgtttgggtaaaacagatttctcgaatatacgggccaagttagaatccccggtaactaccatagtcggatatcatccagcggctagagaccgccaattcgagaaagatagatcatttgaaattatcaacgttttactggaattagacaacaaggcacctataaattgggctcaagggtttatttattaatgctttagtgaaattttaacttgtgttctaaatggatgcggctattagaggtaatgatgttatctttgttcttaagactataggtgtcccgtcagcgtgcagacaaaatgaagatccaagatttgtagaagcatttaaatgcgacgagttagaaagatatattgagaataatccagaatgtacactattcgaaagtcttagggatgaggaagcatactctatagtcagaattttcatggatgtagatttagacgcgtgtctagacgaaatagattatttaacggccattcaagattttattatcgaggtgtcaaactgtgtagctagattcgcgtttacagaatgcggcgccattcatgaaaatgtaataaaatccatgagatctaatttttcattgactaagtctacaaatagagataaaacaagttttcatattatctttttagatacgtataccactatggatacattgatagctatgaaacgaacactattagaattaagtagatcatctgaaaatccactaaccagatcgatagacactgccgtatataggagaaaaacaactcttcgggttgtaggtactaggaaaaatccaaattgcgacactattcatgtaatgcaaccaccgcatgataatatagaagattacctattcacttacgtggatatgaacaacaatagttattacttttctctacaacaacgattggaggatttagttcctgataagttatgggaaccagggtttatttcattcgaagacgctataaaaagagtttcaaaaatattcattaattctataataaactttaatgatctcgatgaaaataattttacaacggtaccactggtcatagattacgtaacaccttgtgcattatgtaaaaaacgatcgcataaacatccgcatcaactatcgttggaaaatggtgctattagaatttacaaaactggtaatccacatagttgtaaagttaaaattgttccgttggatggtaataaactgtttaatattgcacaaagaattttagacactaactctgttttattaaccgaacgaggagaccatatagtttggattaataattcatggaaatttaacagcgaagaacccttgataacaaaactaattttgtcaataagacatcaactacctaaggaatattcaagcgaattactctgtccaagaaaacgaaagactgtagaagctaacatacgagacatgttagtagattcagtggagaccgatacctatccggataaacttccgtttaaaaatggtgtattggacctggtagacggaatgttttactctggagatgatgctaaaaaatatacgtgtactgtatcaaccggatttaaatttgacgatacaaagttcgtcgaagacagtccagaaatggaagagttaatgaatatcattaacgatatccaaccattaacggatgaaaataagaaaaatagagagctatatgaaaaaacattatctagttgtttatgcggtgctaccaaaggatgtttaacattcttttttggagaaactgcaactggaaagtcgacaaccaaacgtttgttaaagtctgctatcggtgacctgtttgttgagacgggtcaaacaattttaacagatgtattggataaaggacctaatccatttatcgctaacatgcatttgaaaagatctgtattctgtagcgaactacctgattttgcctgtagtggatcaaagaaaattagatctgacaatattaaaaagttgacagaaccttgtgtcattggaagaccgtgtttctccaataaaattaataatagaaaccatgcgacaatcattatcgatactaattacaaacctgtttttgataggatagataacgcattaatgagaagaattgccgtcgtgcgattcagaacacacttttctcaaccttctggtagagaggctgctgaaaataatgacgcgtacgataaagtcaaactattagacgaggggttagatggtaaaatacaaaataatatatatagatttgcatttctatacttgttggtgaaatggtacaaaaaatatcatgttcctattatgaaactatatcctacacccgaagagattcctgactttgcattctatctcaaaataggtactctgttggtatctagctctgtaaagcatattccattaatgacggacctctccaaaaagggatatatattgtacgataatgtggtcactcttccgttgactactttccaacagaaaatatccaagtattttaattctagactatttggacacgatatagagagcttcatcaatagacataagaaatttgccaatgttagtgatgaatatctgcaatatatattcatagaggatatttcatctccgtaaatatatgctcatatatttatagaagatatcacatatctaaatgaataccggaatcatagatttatttgataatcatgttgatagtataccaactatattacctcatcagttagctactctagattatctagttagaactatcatagatgagaacagaagcgtgttattgttccatattatgggatcaggtaaaacaataatcgctttgttgttcgccttggtagcttccagatttaaaaaggtttacattctagtgccgaacatcaacatcttaaaaattttcaattataatatgggtgtagctatgaacttgtttaatgacgaattcatagctgagaatatctttattcattccacaacaagtttttattctcttaattataacgataacgtcattaattataacggattatctcgctacaataactctatttttatcgttgatgaggcacataatatctttgggaataatactggagaacttatgaccgtgataaaaaataaaaacaagattccttttttactattgtctggatctcccattactaacacacctaatactctgggtcatattatagatttaatgtccgaagagacgatagattttggtgaaattattagtcgtggtaagaaagtaattcagacacttcttaacgaacgcggtgtgaatgtacttaaggatttgcttaaaggaagaatatcatattacgaaatgcctgataaagatctaccaacgataagatatcacggacgtaagtttctagatactagagtagtatattgtcacatgtctaaacttcaagagagagattatatgattactagacgacagctatgttatcatgaaatgtttgataaaaatatgtataacgtgtcaatggcagtattgggacaacttaatctgatgaataatttagatactttatttcaggaacaggataaggaattgtacccaaatctgaaaataaataatggcgtgttatacggagaagaattggtaacgttaaacattagttccaaatttaaatactttattaatcggatacagacactcaacggaaaacattttatatacttttctaattctacatatggcggattggtaattaaatatatcatgctcagtaatggatattctgaatataatggttctcagggaactaatccacatatgataaacggcaaaccaaaaacatttgctatcgttactagtaaaatgaaatcgtctttagaggatctattagatgtgtataattctcctgaaaacgatgatggtagtcaattgatgtttttgttttcatcaaacattatgtccgaatcctatactctaaaagaggtaaggcatatttggtttatgactatcccagatactttttctcaatacaaccaaattcttggacgatctattagaaaattctcttacgccgatatttctgaaccagttaatgtatatcttttagccgccgtatattccgatttcaatgacgaagtgacgtcattaaacgattacacacaggatgaattaattaatgttttaccatttgacatcaaaaagctgttgtatctaaaatttaagacgaaagaaacgaatagaatatactctattcttcaagagatgtctgaaacgtattctcttccaccacatccatcaattgtaaaagttttattgggagaattggtcagacaatttttttataataattctcgtattaagtataacgataccaagttacttaaaatggttacatcagttataaaaaataaagaagacgctaggaattacatagatgatattgtaaacggtcacttctttgtatcgaataaagtatttgataaatctcttttatacaaatacgaaaacgatattattacagtaccgtttagactttcctacgaaccatttgtttggggagttaactttcgtaaagaatataacgtggtatcttctccataaaactgatgagatatataaagaaataaatgtcgagctttgttaccaatggatacctttccgttacattggaaccacacgagctgacgttagacataaaaactaatattaggaatgccgtatataagacgtatctccatagagaaattagtggtaaaatggccaagaaaatagaaattcgtgaagacgtggaattacctctcggcgaaatagttaataattctgtagttataaacgttccgtgtgtaataacctacgcgtattatcacgttggggatatagtcagaggaacattaaacatcgaagatgaatcaaatgtaactattcaatgtggagatttaatctgtaaactaagtagagattcgggtactgtatcatttagcgattcaaagtactgcttttttcgaaatggtaatgcgtatgacaatggcagcgaagtcactgccgttctaatggaggctcaacaaggtatcgaatctagttttgtttttctcgcgaatatcgtcgactcataaaaaagagaatagcggtaagtataaacacgaatactatggcaataattgcgaatgttttattctcttcgatatatttttgataatatgaaaaacatgtctctctcaaatcggacaaccatctcataaaatagttctcgcgcgctggagaggtagttgccgctcgtataatctctccagaataatatacttgcgtgtcgtcgttcaatttatacggatttctatagttctctgttatataatgcggtttgccctcatgattagacgacgacaatagtgttctaaatttagatagttgatcagaatgaatgtttattggcgttggaaaaattatccatacagcgtctgcagagtggttgatagttgttcctagatatgtaaaataatccaacttactaggcagcaaattgtctagataaaatactgaatcaaacggtgcagacgtattggcggatctaatggaatccaattgattaactatcttttgaaaatatacatttttatgatccaatacttgtaagaatatagaaataatgataagtccatcatcgtgtttttttgcctcttcataagaactatattttttcttattccaatgaacaagattaatctctccagagtatttgtacacatctatcaagtgattggatccataatcgtcttcctttccccaatatatatgtagtgatgataacacatattcattggggagaaaccctccacttatatatcctcctttaaaattaatccttactagttttccagtgttctggatagtggttggtttcgactcattataatgtatgtctaacggcttcaatcgcgcgttagaaattgcttttttagtttctatattaataggagatagttgttgcggcatagtaaaaatgaaatgataactgtttaaaaatagctcttagtatgggaattacaatggatgaggaagtgatatttgaaactcctagagaattaatatctattaaacgaataaaagatattccaagatcaaaagacacgcatgtgtttgctgcgtgtataacaagtgacggatatccgttaataggagctagaagaacttcattcgcgttccaggcgatattatctcaacaaaattcagattctatctttagagtatccactaaactattacggtttatgtactacaatgaactaagagaaatctttagacggttgagaaaaggttctatcaacaatatcgatcctcactttgaagagttaatattattgggtggtaaactagataaaaaggaatctattaaagattgtttaagaagagaattaaaagaggaaagtgatgaacgtataacagtaaaagaatttggaaatgtaattctaaaacttacaacacgggataaattatttaataaagtatatataagttattgcatggcgtgttttattaatcaatcgttggaggatttatcgcatactagtatttacaatgtagaaattagaaagattaaatcattaaatgattgtattaacgacgataaatacgaatatctgtcttatatttataatatgctagttaatagtaaatgaacttttacagatctagtataattagtcagattattaagtataatagacgactagctaagtctattatttgcgaggatgactctcaaattattacactcacggcattcgttaaccaatgcctatggtgtcataaacgagtatccgtgtccgctattttattaactactgataacaaaatattagtatgtaacagacgagatagttttctctattctgaaataattagaactagaaacatgtttagaaagaaacgattatttctgaattattccaattatttgaacaaacaggaaagaagtatactatcgtcatttttttctctagatccagctactactgataatgatagaatagacgctatttatccgggtggcatacccaaaaggggtgagaatgttccagagtgtttatccagggaaattaaagaagaagttaatatagacaattcttttgtattcatagacactcggttttttattcatggcatcatagaagataccattattaataaattttttgaggtaatcttctttgtcggaagaatatctctaacgagtgatcaaatcattgatacatttaaaagtaatcatgaaatcaaggatctaatatttttagatccgaattcaggtaatggactccaatacgaaattgcaaaatatgctctagatactgcaaaacttaaatgttacggccatagaggatgttattatgaatcattaaaaaaattaactgaggatgattgattaaaaaatataaattaatttaccatcgtgtatttttataacgggattgtccggcatatcatgtagatagttaccgtctacatcgtatactcgaccatctacgcctttaaatcctctatttattgacattaatctattagaattggaataccaaatattagtaccctcaattagtttattggtaatattttttttagacgatagatcgatggctcttgaaaccaaggttttccaaccggactcattgtcgatcggtgagaagtctttttcattagcatgaatccattctaatgatgtatgtttaaacactctaaacaattggacaaattcttttgatttgctttgaatgatttcaaataggtcttcgtctacagtaggcataccattagataatctagccattataaagtgcacgtttacatatctacgttctggaggagtaagaacgtgactattgagacgaatggctcttcctactatctgacgaagagacgcctcgttccatgtcatatctaaaatgaagatatcattaattgagaaaaaactaataccctcgcctccactagaagagaatacgcatgttttaatgcattctccgttagtgtttgattcttggttaaactcagccaccgccttgattctagtatcttttgttctagatgagaactctatattagagataccaaagactttgaaatatagtaataagatttctattcctgactgattaacaaatggttcaaagactagacatttaccatgggatgctaatattcccaaacatacatctataaatttgacgcttttctcttttaattcagtaaatagagagatatcagccgcactagcatcccctttcaatagttctccctttttaaaggtatctaatgcggatttagaaaactctctatctcttaatgaatttttaaaatcattatatagtgttgctatctcttgcgcgtattcgcccggatcacgattttgtctttcaggaaagctatcgaacgtaaacgtagtagccatacgtctcagaattctaaatgatgatatacctgtttttatttcagcgagtttagccttttgataaatttcttcttgctttttcgacatattaacgtatcgcattaatactgttttcttagcgaatgatgcagacccttctacgtcatcaaaaatagaaaactcgttattaactatatacgaacatagtcctcctagtttggagactaattctttttcatcgactagacgtttattctcaaatagcgattggtgttgtaaggatcctggtcgtagtaagttaaccaacatggtgaattcttgcacactattgacgataggtgtagccgataaacaaatcatcttatggttttttaacgcaatggtcttagataaaaaattatatactgaacgagtaggacggatcttaccatcttctttgattaatgatttagaaatgaagttatgacattcatcaataatgacgcatattctactcttggaattaatagttttgatattagtaaaaaatttatttctaaaattttgatcatcgtaattaataaaaatacaatccttcgttatctctggagcgtatctgagtatagtgttcatccaaggatcttctatcaaagcctttttcaccaataagataatagcccaattcgtataaatatccttaagatgtttgagaatatatacagtagtcattgttttaccgacacccgtttcatggaacaataaaagagaatgcatactgtctaatcctaagaaaactcttgctacaaaatgttgataatccttgaggcgtactacgtccgaccccatcatttcaacgggcatattagtagttctgcgtaaggcataatcgatataggccgcgtgtgatttactcatttatgagtgataagtaataactatgttttaaaaatcacagcagtagtttaactagtcttctctgatgtttgttttcgatactttttgaatcagaagtcatactagaataaagcaacgagtgaacgtaatagagagcttcgtatactctattcgaaaactctaagaacttattaatgaattccgtatccactggattgtttaaaatactaaattgaacactgttcacatccttccaagaagaagacttagtgacggacttaacatgagacataaataaatccaaattttttttacaaacatcactagccaccataatggcgctatctttcaaccagctatcgcttacgcattttagcagtctaacatttttaaagagactacaatatattctcatagtatcgattacacctctaccgaataaagttggaagtttaataatacaatatttttcgtttacaaaatcaaataatggtcgaaacacgtcgaaggttaacatcttataatcgctaatgtatagattgttttcagtgagatgattattagatttaatagcatctcgttcacgtttgaacagtttattgcgtgcgctgaggtcggcaactacggcgtccgctttagtactcctcccataatactttacgctattaatctttaaaatttcatagactttatctagatcgctttctggtaacatgatatcatgtgtaaaaagttttaacatgtcggtcggcattctatttagatcattaactctagaaatctgaagaaagtaattagctccgtattccagactaggtaatgggcttttacctagagacagattaagttctggcaatgtttcataaaatggaagaaggacatgcgttccctcccggatattttttacaatttcatccatttacaactctatagtttgttttcattattattagttattatctcccataatcttggtaatacttaccccttgatcgtaagataccttatacaggtcattacatacaactaccaattgtttttgtacataatagattggatggttgacatccatggtggaataaactactcgaacagatagtttatctttccccctagatacattagccgtaatagttgtcggcctaaagaatatctttggtgtaaagttaaaagttagggttcttgttccattattgctttttgtcagtagttcattataaattctcgagatgggtccgttctctgaatatagaacatcatttccaaatctaacttctagtctagaaataatatcggtcttattcttaaaatctattcccttgatgaagggatcgttaatgaacaaatccttggcctttgattcggctgatctattatctccgttatagacgttacgttgactagtccaaagacttacaggaatagatgtatcgatgatgttgatactatgtgatatgtgagcaaagattgttctcttagtggcatcactatatgttccagtaatggcggaaaactttttagaaatgttatatataaaagaattttttcgtgttccaaacattagcagattagtatgaagataaacactcatattatcaggaacattatcaatttttacatacacatcagcatcttgaatagaaacgataccatcttctggaacctctacgatctcggcagactccggataaccagtcggtgggccatcgctaacaataactagatcatccaacaatctactcacatatgcatctatataatctttttcatcttgtgagtaccctggatacgaaataaatttattatccgtatttccataataaggtttagtataaacagagagagatgttgccgcatgaacttcagttacagtcgccgttggttggtttatttgacctattactctcctaggtttctctataaacgatggtttaatttgtacattcttaaccatatatccaataaagctcaattcaggaacataaacaaattctttgttgaacgtttcaaagtcgaacgaagagtcacgaataacgatatcggatactggattgaaggttaccgttacggtaatttttgaatcggatagtttaagactgctgaatgtatcttccacatcaaacggagttttaatataaacgtatactgtagatggttctttaatagtgtcattaggagttaggccaatagaaatatcattaagttcactagaatatccagagtgtttcaaagcaattgtattattgatacaattattatataattcttcgccctcaatttcccaaataacaccgttacacgaagagatagatacgtgattaatacatttatatccaacatatggtacgtaactgaatcttcccatacctttaacttctggaagttccaaactcagaaccaaatgattaagcgcagtaatatactgatccctaatttcgaagctagcgatagcctgattgtctggaccatcgtttgtcataactccggatagagaaatatattgcggcatatacaaagttggaatttgactatcgactgcgaagacattagaccgtttaatagagtcatccccaccgatcaaagaattaatgatagtattattcattttctatttaaaatggaaaaagcttacaataaactccgtagagaaatatctataatttgtgagttttccttaaagtaacagcttccgtaaacgccgtctttatctcttagtaggtttattgtatttatgaccttttccttatcttcatagaatactaaaggcaacaaagaaatttttggttcttctctaagagctacgtgagacttaaccatagaagccaacgaatccctacatattttagaacagaaataccctacttcaccacccttgtatgtctcaatactaataggtctaaaaaccaaatcttgattacaaaaccaacacttatcaattacactatttgtcttaatagacacatctgccatagatttataatactttggtagtatacaagcgagtgcttcttctttagcgggcttaaagactgctttaggtgctgaaataaccacatctggaaggcttactcgcttagccatttaattacggaactatttttttatacttctaatgagcaagtagaaaacctctcatctacaaaaacgtactcgtgtccataatcctctaccatagttacacgttttttagatctcatatgtgctaaaaagttttcccatactaattggttactattatttttcgtataatttttaacagtttgaggttttagatttttagttacagaagtgatatcgaatattttatccaaaaagaatgaataattaattgtcttagaaggagtgttttcttggcaaaagaataccaagtgcttaaatatttctactacttcattaatcttttctgtactcagattcagtttctcatcttttacttgattgattatttcaaagactaacttataatcctttttatttattctctcgttagccttaagaaaactagatacaaaatttgcatctacatcatccgtggatatttgatttttttccatgatatccaagagttccgagataatttctccagaacattgatgagacaataatctccgcaatacatttctcaaatgaataagtttattagacacgtggaagtttgactttttttgtacctttgtacatttttgaaataccgactcgcaaaaaatacaatattcatatccttgttcagatactataccgttatgtctacaaccgctacataatcgtagattcatgttaacactctacgtatctcgtcgtccaatattttatataaaaacattttatttctagacgttgccagaaaatcctgtaatatttttagttttttgggctgtgaataaagtatcgccctaatattgttaccgtcttccgccaatatagtagttaaattatccgcacatgcagaagaacaccgcttaggcggattcagtacaatgttatatttttcgtaccaactcatttaaatatcataatctaaaatagttctgtaatatgtctagcgctaatatattgatcataatcctgtgcataaattaagatacaacaatgtctcgaaatcatcgacatggcttcttccatagttagaagatcgtcgtcaaagttagcaacgtgattcatcaacatttgctgttttgaggcagcaaatactgaaccgtcgccattcaaccattcataaaaaccatcgtctgaatccattgataatttcttgtactggtttttgagagctcgcatcaatctagcatttctagctcccggattgaaaacagaaagaggatcgtacatccagggtccattttctgtaaatagaatcgtataatgtcccttcaagaagatatcagacgatccacaatcaaagaattggtctccgagtttgtaacaaactgcggactttaacctatacatgataccgtttagcataatttctggtgatacgtcaatcggagtatcatctattagagatctaaagccggtgtaacattctccaccaaacatattcttattctgacgtcgttctacataaaacatcattgctccattaacgataacaggggaatgaacagcactacccatcacattagttcccaatggatcaatgtgtgtaactccagaacatcttccatagcctatgttaggaggagcgaacaccactcttccactattgccatcgaatgccatagaataaatatccttggaattgatagaaatcggactgtcggatgttgtgatcatcttcataggattaacaactatgtatggtgccgcctgaagtttcatatcgtaactgatgccgtttataggtctagccacagaaaccaacgtaggtctaaatccaactatagacaaaatagaagccaatatctgttcctcatctgtcataacttgagagcatccagtatgaataatcttcattagatggggatctaccgcatcatcatcgttacaataaaaaattcccattctaatgttcataattgcttttctaatcatggtatgcatgtttgctctctgaatctctgtggaaattagatctgatacacctgtaatcactatcggattatcctccgtaagacgattaaccaacaacatataattataagactttacttttctaaattcataaagttgctggattaggctataggtgtctccatgtacatacgcgttctcgagcgcaggaagtttaataccgaatagtgccatcagaataggatgaatatagtaattagtttctggttttctataaataaaagacaaatcttgtgaactagacatatcggtaaaatgcatggattggaatcgtgtagtcgacagaagaatatgatgattagatggagagtatattttatctaactctttgagttggtcaccgattctaggactagctcgagaatgaataagtactaaaggatgagtacatttcacagaaacactagcattgttcaatgtgctctttacatgggtaaggagttgaaatagctcgtttctatttgttctgacaatatttagtttattcataatgttaagcatatcctgaatagtaaagttagatgtgtcatacttgttagtagttagatatttagcaattgcattcccatcatttctcaatctcgtactccaatcatgcgtggatgctacttcgtcgatggaaaccatacaatcctttttgataggctgttgagattgatcatttcctgcacgtttaggtttggtacgttgatttctagcccctgcggatataaagtcatcgtctacaatttgggacaatgaattgcatacactacaagacaaagatttatcagaagtgtgaatatgatcttcatctaccaaagaaagagtttgattagtataactagattttagtcctgcgttagatgttaaaaaaacatcgctattgaccacggcttccattatttatattcgtagtttttactcgaaagcgtgattttaatatccaatcttattacttttggaatcgttcaaaacctttgactagttgtagaatttgatctattgccctacgcgtatactcccttgcatcatatacgttcgtcaccagatcgtttgtttcggcctgaagttggtgcatatctctttcaacattcgacatgagatccttaagggccatatcgtctagattttgttgagatgctgctcctggatttggattttgttgtgctgttgtacatactgtaccaccagtaggtgtaggagtacatacagtggccacaataggaggttgagaaagtgtaaccgttggagtagtacaagaaatacttccatccgattgttgtgtacatgtagttgttggtaacgtctgagaaggttgggtagatggcggcgtcgtcgttttttgatctttattaaatttagagataatatcctgaacagcattgctcggcgtcaacgctggaaggagtgaactcgccggcgcatcagtatcttcagacagccaatcaaaaagattagacatatcagatgatgtattagtttgttgtcgtggttttggtgtaggagcagtactactaggtagaagaataggagccgatgtagctgttggaaccggctgtggagttatatgaatagttggttgtagcggttggataggctgtctgctggcggccatcatattatctctagctagttgttctcgcaactgtctttgataatacgactcttgagactttagtcctatttcaatcgcttcatcctttttcgtatccggatccttttcttcagaataatagattgacgactttggtgtagaggattctgccagcctctgtgagaacttgttaaagaagtccatttaaggctttaaaattgaattgcgattataagattaaatggcagacacagacgatattatcgactatgaatccgatgatctcaccgaatacgaggatgatgaagaagaggaagaagatggagagtcactagaaactagtgatatagatcccaaatcttcttataagattgtagaatcagcatccactcatatagaagatgcgcattccaatcttaaacatatagggaatcatatatctgctcttaaacgacgctatactagacgtataagtctatttgaaatagcgggtataatagcagaaagctataacttgcttcaacgaggaagattacctctagtttcagaattttctgacgaaacgatgaagcaaaatatgctacatgtaattatacaagagatagaggagggttcttgtcctatagtcatcgaaaagaacggagaattgttgtcggtaaacgattttgacaaagatggtctaaaattccatctagactatattatcaaaatttggaaacttcaaaaacgatattagaatttatacgaatatcgttctctaaatgtcacaatcaagtctcgcatgttcagcaatttattgtcgtactttatatcgtgttcattaacgatatcttgcaaaatagtaatgattctatcttccttcgatagatattcttcagagattattgtcttatattctttcttgttatcagatatgaatttgataagactttgaacattattgatacccgtctgtttaattttttctacagatattttagttttggcagattctatcgtatctgtcaatagacatccaacatcgacattcgacgtcaattgtctataaatcaacgtataaattttagaaataacattagcgaattgttgtgcgttgatgtcgttattctgaaacagtatgattttaggtagcattttcttaacaaagagaacgtatttattgttactcagttgaacagatgatatatccagattactaacgcatctgattccgtataccaaactttcagaagaaatggtatacaattgtttgtattcattcaatgtctctttttcagaaattagtttagagtcgaatactgcaataattttcaagagatagttttcatcagataagattttatttagtgtagatatgataaaactattgttttgttggagaacttgatacgccgcgttctctgtagtcgacgctctcaaatgggaaacaatctccattatttttttggaatcggatactatatcttcggtatcttgacgcagtctagtatacatagagttaagagagattagagtttgtacattaagcaacatgtctctaaatgtggctacaaacttttcctttttcacatcatctagtttattatataccgatttcacaacggcaccagatttaaggaaccagaatgaaaaactctgataactacaatatttcatcatagttacgattttatcatcttctatagttggtgtaatagcgcatacctttttctccaagactggaaccaacgtcataaaaatgtttaaatcaaaatccatatcaacatctgatgcgctaagaccagtctcgcgttcaagattatctttactaatggtgacgaactcatcgtataaaactctaagtttgtccattatttatttacagatttagttgtttaatttatttgtgctcttccagagttgggatagtatttttctaacgtcggtattatattattaggatctacgttcatatgtatcataatattaatcatccacgttttgataaatctatctttagcttctgaaataacgtatttaaacaaaggagaaaaatatttagctacggcatcagacgcaataacattttttgtaaatgtaacgtatttagacgacagatcttcgttaaaaagttttccatctatgtagaatccatcggttgttaacaccattcccgcgtcagattgaataggagtttgaatagtttgttttggaaatagatccttcaataacttatagttgggtgggaaaaaatcgattttatcactagactctttcttttttactatcattacctcatgaactatttcttgaatgagtatatgtattttctttcctatatcggacgcgttcattggaaaatataccatgtcgttaactataagaatatttttatcctcgtttacaaactgaataatatcagatgtagttcgtaaacgaactatatcatcaccagcacaacatctaactatatgatatccactagtttcctttagccgtttattatcttgttccatattagcagtcattccatcatttaagaaggcgtcaaaaataatagggagaaatgacattttggattctgttacaactttaccaaaattaaggatatacggacttactatctttttctcaacgtcaatttgatgaacacacgatgaaaatgtgcttctatgagattgatcatgtagaaaacaacaagggatacaatatttccgcatatcatgaaatatattaagaaatcccaccttattatatttccccaaaggatccatgcacgtaaacattatgccgttatcattaataaagacttctttctcatcggatctgtaaaagttgttactgatttttttcattccaggatctagataattaataatgatgggttttctattcttattctttgtattttggcatatcctagaccagtaaacagtttccactttggtaaaatcagcagacttttgaacgctattaaacatggcattaatggcaataactaaaaatgtaaaatatttttctatgttaggaatatggtttttcactttaatagatatatggtttttggccaaaatgatagatatttttttatccgaggatagtaaaatattattagtcgccgtctctataaaaatgaagctagtctcgatatccaattttattctagaattgataggagtcgccaaatgtaccttatacgttatatctcccttgatgcgttccatttgtgtatctatatcggacacaagatctgtaaatagttttacgttattaatcatcacggtatcgccgtcgctagataacgctaatgtaccatccaagtcccaaatggagagatttaactgttcatcgtttagaataaaatgattaccggtcatattaataaagtgttcatcgtatctagataacaacgacttataattaatgtccaagtcttgaactcgctgaatgatcttttttaacccagttagttttagattggtacgaaatatattgttaaactttgattctacagtaatgtccaaatctagttgtggaaatacttccatcaacattgtttcaaacttgataatattattatctacatcttcgtacgatccaaattccggaatagatgtatcgcacgctctggccacccagataaccaaaaagtcacacgctccaggatatacattgtataaaaagctatcgttttttagtagggtttttttctgcgtgtatacgaagggattaaaaatagtattatcaacgtaactatattccaaattattcttatgagaatagataataatatcgtccttaatatctaacaaatttcctaaatatccctttaattgagtcattcgaagcgtcaatagaatatgtctcttaactatttccggctgttgtatatttaaatgacttcgtaaaaaataatatatgggcgacttctcatctatgtaatcatatggagtgagatatagggctcgttctacctcctgccccttacccacctgtaataccaattgcggacttactatatatcgcatatttatatcgtggggtaaagtgaaaatctactaccgatgatgtaagtcttacaatgttcgaaccagtaccagatcttaatttggaggcctccgtagaactaggggaggtaaatatagatcaaacaacacctatgataaaggagaatagcggttttatatcccgcagtagacgtctattcgcccatagatctaaggatgatgagagaaaactagcactacgattctttttacaaagactttattttttagatcatagagagattcattatttgttcagatgcgttgacgctgtaaaagacgtcactattaccaaaaaaaataacattatcgtggcgccttatatagcacttttaactatcgcatcaaaaggatgcaaacttacagaaacaatgattgaagcattctttccagaactatataatgaacatagtaagaaatttaaattcaactctcaagtatccatcatccaagaaaaactcggataccagtttggaaactatcacgtttatgattttgaaccgtattactctacagtagctctggctattcgagatgaacattcatctggcatttttaatatccgtcaagagagttatctggtaagttcattatctgaaataacatatagattttatctaattaatctaaaatctgatcttgttcaatggagtgctagtacgggcgctgtaattaatcaaatggtaaatactgtattgattacagtgtatgaaaagttacaactggtcatagaaaatgattcacaatttacatgttcattggctgtggaatcaaaacttccaataaaattacttaaagatagaaatgaattatttacaaaattcattaacgagttaaaaaagaccagttcattcaagataagcaaacgcgataaggatacgctactaaaatattttacttaggactggagttagaatttatagacgactcatttcgtttatcattgttactattattactattactatcattattagtgttggcattattagtattcttcttgtcatcttgttcagaaatatacagcaatgctatacctaatactaaatacattatcatgctcgcaatggctctaacaacaacgaaccaaaatgaatttggtcgtagcttttgttcacaaaaatacataaagaaatgtctacataaatctatggcgccattggctacttgaaatagcgccagtcctcctacagattttaatatagctgtataacatgacatttattcatcatcaaaagagacagagtcaccatctgtcatatttagattttttttcatgtgttcaaagtatcctctactcatttcattataatagtttatcatacttagaattttaggacggatcaatgagtaagacttgactagatcgtcagtagtaatttgtgcatcgtctattctgcatccgcttcgtcgaataatgtatagcatcgctttgagattctccatagctatcaagtctttatacaatgacatggaaatatctgtgaatactttatacttctccaacatcgatgccttaacatcatcgcctactttagcattgaaaatacgttctattgtgtagatggatgtagcaagatttttaaacaacaatgccatcttacacgatgattgcctcaagtctccaatcgtttgtttagaacgattagctacagagtccaatgcttggctgactagcatattattatctttagaaattgtattcttcaatgaggcgtttatcatatctgtgatttcgttagtcatattacagtctgactgggttgtaatgttatccaacatatcacctatggatacggtacacgtaccagcatttgtaataatcctatctaagatgttgtatggcattgcgcagaaaatatcttctcctgtaatatctccactctcgataaatctactcagattattcttaaatgccttattctctggagaaaagatatcagtgtccatcatttcattaatagtatacgcagaaaagataccacgagtatcaattctatccaagatacttatcggttccgagtcacagataatggtttcctctccttcgggagatcctgcatagaaatatctaggacaatagtttctatactgtctgtaactctgataatctctaaagtcactaactgataccatgaaattgagaagatcaaacgctgaagtaattaatttttctgcctcgtttttactacaactagttttcatcaatgtagtgacgatgtattgtttagttacttttggtctaatactgatgatagagatattattgcttcccataatggatcttctagtagtcaccttaaagcccattgatgcgaatagcagatagataaagtcttggtatgactcctttctaatatagtacggactacctttgtcacccaactttatacccacataagccataacaacctctttaatagccgtttcatgaggtttatcagccatgagcctgagtagttggaagaatctcatgaatcccgtctcagaaagtcctatatgcatgatagatttatctttcctgggaaactctcgtatagtcatagatgaaatactctttaaagtttctgaaataagattagtaacagtcttacctccgactactctaggtaacaaacaaactctaataggtgttttctctgcggagataatatcagaaaggatagagcaataagtagtattattgtgattataaagaccgaatacataacaggtagaatttataaacatcatgtcctgaaggtttttagacttgtattcctcgtaatccataccgtcccaaaacatggatttggtaactttgatagccgtagatctttgttccttcgccaacaggttaaagaaattaataaagaatttgttgtttctatttatgtccacaaattgcacgtttggaagcgccacggttacattcactgcagcattttgaggatcgcgagtatgaagtacgatgttattgtttactggtatatctggaaagaaatctaccagtctaggaataagagattgatatcgcatagaaatagtaaagtttataatctcatcatcgaagagcattttgttaccattgtaataaatatccactctgtcatatgtataaatgaagtactgttcaaacatgatgagatgtttatatgttggcatagtagtgagatcgacgtttggtaatggcaatgtattaagattaactccataatgtctagcagcatctgcgatgttataagcgtcgtcaaagcggggtcgatcttgtattgttatatattgtctaacacctataagattatcaaaatcttgtctgcttaatacaccgttaacaatttttgccttgaattcttttattggtgcattaataacatccttatagaggatgttaaacaaataagtgttatcaaagttaagatctggatatttcttttctgctagaacatccattgagtcggagccatctggtttaatataaccaccgataaatctagctctgtattctgtatccgtcaatctaatattaagaaggtgttgagtgaaaggtggaagatcgtaaaagctgtgagtattaatgataggattagtttccgaactaatgttaattggggtattaataatatctatatttccagcgttaagtgtaacattaaacagttttaattcacgtgacgtggtatcaattaaataattaatgcccaatttggatatagcagcctgaagctcatcttgtttagttacggatcctaatgagttattaagcaatatatcgaacggatgaacgaaggttgttttaagttggtcacatactttgtaatctagacatagatgcggaagaacggtagaaactatacgaaataaatattcagagtcctctaattgatcaagagtaactattgacttaataggcatcatttatttagtattaaatgacgaccgtaccagtgacggatatacaaaacgatttaattacagagttttcagaagataattatccatctaacaaaaattatgaaataactcttcgtcaaatgtctattctaactcacgttaacaacgtggtagatagagaacataatgccgccgtagtgtcatctccagaggaaatatcctcacaacttaatgaagatctatttccagatgatgattcaccggccactattatcgaacgagtacaacctcatactactattattgacgatactccacctcctacgtttcgtagagagttattaatatcggaacaacgtcaacaacgagaaaaaagatttaatattacagtatcgaaaaatgctgaagcaataatggaatctagatctatgataacttctatgccaacacaaacaccatccttgggagtagtttatgataaagataaaagaattcagatgttagaggatgaagtggttaatcttagaaatcaacgatctaatacaaaatcatctgataatttagataattttaccaaaatactatttggtaagactccgtacaaatcaacagaagttaataagcgtatagccatcgttaattatgcaaatttgaacgggtcccccttatcagtcgaggacttggatgtttgttcggaggatgaaatagatagaatctataaaacgattaaacaatatcacgaaagtagaaaacgaaaaattatcgtcactaacgtgattattattgtcataaacattatcgagcaggcattgctaaaactcggatttgaagaaatcaaaggactgagtaccgatatcacttcagaaattatcgatgtggagatcggagatgactgcgatgctgtagcatctaaactaggaatcggtaacagtccggttcttaatattgtattgtttatactcaagatattcgttaaacgaattaaaattatttaatttaatacattcccatatccagacaacaatcgtctggattaatctgttcctgtcgtctcataccggacgacatattaatctttttattagtgggcatctttttagatggtttctttttcccagcattaactgagtcgatacctagaagatcgtgattgatctctccgaccattccacgaacttctaattggccgtctctgacggtaccataaactattttaccagcattagtaacagcttggacaatctgaccatccatcgcattgtacgatgtagtagtaactgttgttctacgtctaggagcaccagaagtatttttggagcccttggatgttgatgtagaagaagacgaggattttgattttggtttacatgtaatacattttgaactctttgattttgtatcacatgcgccggcagtcacatctgtttgagaattaagattattgttgcctcctttgacggctgcatctccaccgatttgcgctagtagatttttaagctgtggtgtaatcttattaactgtttcgatataatcatcgtaactgcttctaacggctaaattttttttatccgccatttagaagctaaaaatatttttatttatgcagaagatttaactagattatacaatgaactaatatgatccttttccagattatttacaaacttggtattttttggttctggaggaggcgaatttaaattcggacttggattcggattttgtaagttcttgatcttattatacatcgagtataggatggcgacagtaactgctacacaaataccgatcaaaagaagaataccaatcatttattgacaataacttcactattgatcaagtatgcaatatatcatcttttcactaaataagtagtaataatgattcaacaatgtcgagatatatggacgataataatttagttcatggaaatatcgctatgattggtgtgaatgactccgctaactctgtggggtgcgcagtgctttccccacatagaataaattagcattccgactgtgataataataccaagtataaacgccataatactcaatactttccatgtacgagtgggactggtagacttactaaagtcaataaaggcgaagatacacgaaagaatcaaaagaatgattccagcgattagcacgccggaaaaataatttccaatcataagcatcatgtccatttaactaataaaaattttaaatcgccgaatgaacaaagtggaatataaaccatataaaaacaatagtttgtactgcaaaaataatatctatttttgttttcgaagatatggtaaaattaaatagtagtacacagcatgttataactaacagcagcaacggctcgtaattacttatcatttactagacgaaaaggtggtgggatattttcttgctcaaataatacgaatatatcacccatccattttatgcgatgtttatatactctaatctttaatagatctatagacgacgggtttaccaacaatatagattttatcgattcatctaatttaaacccttccttaaacgtgaatgatctattatctggcataacgatgaccctacctgatgaatcggacaatgtactgggccatgtagaataaattatcaacgaattatcgtctacgaacatttatatcatttgttttaattttaggacgcgaataaatggatataaaatagaaaataacagatattacaaccagtgttatggccgcgcccaaccaggtaggcagttttattttatcttttactacaggttctcctggatgtacgtcaccaacggcggacgtagttctagtacaattagacgtaagttccgcttgggaattttttaacgctaaagagttaacgttaatcgtgcacccaacgtatttacatctagttcgttgaacatcttgattataatataaccattttctatctctagattcgtcagtgcactcatgtaaccaacataccctaggtcctaaatatttatctccggaattagattttggataattcgcgcaccaacaatttctatttcctttatgatcgttacaaaagacgtataatgccgtatccccaaaagtaaaataatcaggacgaataattctaataaactcagaacaatatctcgcatccatatgtttggagcaaatatcggaataagtagacatagccggtttccgttttgcacgtaaccattctaaacaattggggtttccaggatcgtttctacaaaatccagtcatgaaatcgtcacaatgttctgtcttgtaattattattaaatatttttggacagtgtttggtatttgtcttagaacaacattttgccacgctatcactatcgcccaggagataatccttttttataaaatgacatcgttgcccggatgctatataatcagtagcgtgttttaaatccttaatatattcaggagttacctcgttctgataatagattaatgatccaggacgaaatttgaaagaactacatggttctccatgaattaatacatattgtttagcaaattcaggaactataaaactactacaatgatctatcgacataccatctatcaaacaaaacttgggtttaatttctcccggagatgtttcataatagtacgtataactttcttctgcaaacttaacagctctattatattcaggataattaaaacctaattccatatatttgtctcgtatatctgctattcctggtgctattttgattctattaagagtaacagctgcccccattcttaataatcgtcagtatttaaactgttaaatgttggtatatcaacatctaccttatttcccgcagtataaggtttgttgcaggtatactgttcaggaatggttacatttatacttcttctatagtcctgtctttcgatgttcatcacatatgcaaagaacagaataaacaaaataatgtaagaaataatattaaatatctgtgaattcgtaaatacattgattgccataataattacagcagctacaatacacacaatagacattcccacagtgttgccattacctccacgatacatttgagttactaagcaataggtaataactaagctagtaagaggcaatagaaaagatgagataaatatcatcaatatagagattagaggagggctatatagagccaagacgaacaaaatcaaaccgagtaacgttctaacatcattatttttgaagattcccaaataatcattcattcctccataatcgttttgcatcatacctccatctttaggcataaacgattgctgctgttcctctgtaaataaatctttatcaagcactccagcacccgcagagaagtcgtcaagcatattgtaatatcttaaataactcatttatatattaaaaaatgtcactattaaagatggagtataatctttatgccgaactaaaaaaaatgacttgtggtcaacccctaagtctttttaacgaagacggggatttcgtagaagttgaaccgggatcatcctttaagtttctgatacctaagggattttacgcctctccttccgtaaagacgagtctagtattcgagacattaacaacgaccgataataaaatcactagtatcaatccaacaaatgcgccaaagttatatcctcttcaacgcaaagtcgtatctgaagtagtttctaatatgaggaaaatgatcgaatcaaaacgtcctctatacatcactcttcacttggcgtgtggatttggtaagactattaccacgtgttatcttatggctacacacggtagaaaaaccgtcatttgcgtacccaataaaatgttaatacatcaatggaagacacaggtagaggcagtcggattggaacataagatatccatagatggagtaagtagtctattaaaggaactaaagactcaaagtccggatgtattaatagtagtcagtagacatctgacaaacgatgccttttgtaaatatatcaataagcattatgatttgttcatcttggatgaatcacatacgtataatctgatgaacaatacagcagttacaagatttttagcgtattatcctccgatgatgtgttattttttaactgctacacctagaccatctaaccgaatttattgtaacagtattattaatattgccaagttatccaatctaaaaaaaactatctatgcagtagatagtttttttgagccatattccacagataatattagacatatggtaaaacgactagatggaccatctaataaatatcatatatataccgagaagttattatctgtagacgagcctagaaatcaacttattcttgataccctggtagaagaattcaagtcaggaactattaatcgcattttagttattactaaactacgtgaacatatggtattattctacaaacgattattagattttttcggaccagaggttgtatttataggagacgcccaaaatagacgtactccagatatggtcaaatcaatcaaggaactaaatagatttatattcgtatccaccttattttattccggtactggtttagatattcctagtttggattcgttgttcatttgctcggcagtaatcaacaatatgcaaatagagcaattactagggagggtatgtcgagaaacagaactattagataggacggtatatgtatttcctaacacatccatcaaagaaataaagtacatgataggaaatttcatgcaacgaattattagtctgtctgtagataaactaggatttaaacaaaaaagttatcggaaacatcaagaatccgatcccacttctgcatgtacaacatcatccagagaagaacgtgtattaaatagaatatttaactcgcaaaatcgttaagaagtttaagcgacgatccgcatgctgcgcaggccagtgtattacccctcatagtattaatataatccaatgatacttttgtgatgtcggaaatcttaaccaatttagactgacaggcagaacacgtcatgcaatcatcatcgtcatcgataactgtagtcttgggcttctttttgcgactcttcattccggaacgcacattggtgctatccatttaggtagtaaaaaataagtcagaatatgccctataacacgatcgtgcaaaacctggtatatcgtctctatctttatcacaatatagtgtatcgacatttttattattattgacctcgtttatcttggaacatggaatgggaacatttttgttatcaacggccatctttgccttaattccagatgttgtaaaattataactaaacagtctatcatcgacacaaatgaaattcttgtttagacgtttgtagtttacgtatgcggctcgttcgcgtctcattttttcagatattgcaggtactataatattaaaaataagaatgaaataacataggattaaaaataaagttatcatgacttctagcgctgatttaactaacttaaaagaattacttagtctgtacaaaagtttgagattttcagattctgcggctatagaaaagtataattctttggtagaatggggaacatctacttactggaaaataggcgtgcaaaaggtagctaatgtcgagacgtcaatatctgattattatgatgaggtaaaaaataaaccgtttaatattgatccgggctattacattttcttaccggtatattttgggagcgtctttatttattcgaagggtaaaaatatggtagaacttggatctggaaactcttttcaaataccagatgatatgcgaagtgcgtgtaacaaagtattagacagcgataacggaatagactttctgagatttgttttgttaaacaatagatggataatggaagatgctatatcaaaatatcagtctccagttaatatatttaaactagctagtgagtacggattaaacatacccaaatatttagaaattgaaatagaggaagacacattatttgacgacgagttatactctattatagaacgctctttcgatgataaatttccaaaaatatccatatcgtatattaagttgggagaacttagacggcaagttgtagactttttcaaattctcattcatgtatattgagtccatcaaggtagatcgtataggagataatatttttattcctagcgttataacaaaatcaggaaaaaagatattagtaaaagatgtagaccatttaatacgatccaaggttagagaacatacatttgtaaaagtaaaaaagaaaaacacattttccattttatacgactatgatggaaacggaacagaaactagaggagaagtaataaaacgaattatagacactataggacgagactattatgttaacggaaagtatttctctaaggttggtagtgcaggcttaaagcaattgactaataaattagatattaatgagtgcgcaactgtcgatgagttagttgatgagattaataaatccggaactgtaaaacgaaaaataaaaaaccaatcagcatttgatttaagcagagaatgtttgggatatccagaagcggattttataacgttagttaataacatgcggttcaaaatagaaaattgtaaggttgtaaatttcaatattgaaaatactaattgtttaaataacccgagtattgaaactatatatggaaactttaaccagttcgtctcaatctttaatgtcgtcaccgatgtcaaaaaaagattattcgagtgaaataatatgcgcctttgatataggtgcaaaaaatcctgccagaactgttttagaagtcaaggataactccgttagggtattggatatatcaaaattagactggagttctgattgggaaaggcgcatagctaaagatttgtcacaatatgaatacactacagttcttctagaacgtcagcctagaaggtcgccgtatgttaaatttatctattttattaaaggctttttatatcatacatcggctgccaaagttatttgcgtctcgcctgtcatgtctggtaattcatatagagatcgaaaaaagagatcggtcgaagcatttcttgattggatggacacattcggattgcgagactccgttccggatagacgcaaattagacgatgtagcggatagtttcaatttggctatgagatacgtattagataaatggaatactaattatacaccttataataggtgtaaatctagaaattacataaaaaaaatgtaataacgttagtaacgccattatggataatctatttacctttctacatgaaatagaagatagatatgccagaactatttttaactttcatctaataagttgcgatgaaataggagatatatatggtcttatgaaagaacgcatttcctcagaggatatgtttgataatatagtgtataataaagatatacatcctgccattaagaaactagtgtattgcgacatccaacttactaaacacattattaatcagaatacgtatccggtatttaacgattcttcacaagtgaaatgttgtcattatttcgacataaactcagataatagcaatattagctctcgtacagtagagatatttgagagggaaaagtcatctcttgtatcatatattaaaactaccaataagaagagaaaggtcaattacggcgaaataaagaaaactgttcatggaggcactaatgcaaattacttttccggtaaaaagtctgacgagtatctgagtactacagttagatccaacattaatcaaccttggatcaaaaccatctctaagaggatgagagttgatatcattaatcactctatagtaacgcgtggaaaaagctctatattacaaactatagaaattatttttactaatagaacatgtgtgaaaatattcaaggattctactatgcacattattctatccaaggacaaggatgaaaaggggtgtatacacatgattgacaaattattctatgtctattataatttatttctgttgttcgaagatatcatccaaaacgagtactttaaagaagtagctaatgttgtaaaccacgtactcacggctacggcattagatgagaaattattcctaattaagaaaatggctgaacacgatgtttatggagttagcaatttcaaaatagggatgtttaacctgacatttattaagtcgttggatcataccgttttcccctctctgttagatgaggatagcaaaataaagttttttaaggggaaaaagctcaatattgtagcattacgatctctggaggattgtataaattacgtgactaaatccgagaatatgatagaaatgatgaaggaaagatcgactattttaaatagcatagatatagaaacggaatcggtagatcgtctaaaagaattgcttctaaaatgaaaaaaaacactaattcagaaatggatcaacgactagggtataagtttttggtgcctgatcctaaagccggagttttttatagaccgttacatttccaatatgtatcgtattctaattttatattgcatcgattgcatgaaatcttgaccgtcaagcggccactcttatcgtttaagaataatacagaacgaattatgatagaaattagcaatgttaaagtgactcctccagattactcacctataatcgcgagtattaaaggtaagagttatgacgcattagccacgttcactgtaaatatctttaaagaggtaatgaccaaagagggtatatccatcactaaaataagtagttatgagggaaaagattctcatttgataaaaattccgctactaataggatacgggaataaaaatccacttgatacagccaagtatcttgttcctaatgtcataggtggagtctttatcaataaacaatctgtcgaaaaagtaggaattaatctagtagaaaagattacaacatggccaaaatttagggttgttaagccaaactcattcactttctcgttttcctccgtatcccctcctaatgtattaccgacaagatatcgccattacaagatatctctggatatatcacaattggaagcgttgaatatatcatcgacaaagacatttataacggtcaatattgttttgctgtctcaatatttatctagagtgagtctagaattcattagacgtagtttatcatacgatatgcctccagaagttgtctatctagtaaacgcgataatagatagtgctaaacgaattactgaatctattactgactttaatattgatacatacattaatgacctggtggaagctgaacacattaaacaaaaatctcagttaacgatcaacgagttcaaatatgaaatgctgcataactttttacctcatatgaactatacacccgatcaactaaagggattttatatgatatctttactaagaaagtttctctactgtatcttccacacttctagatatccagatagagattcgatggtttgtcatcgcatcctaacgtacggcaaatattttgagacgttggcacatgatgaattagagaattacataggcaacatccgaaacgatatcatgaacaatcacaagaacagaggcacttacgcggtaaacattcatgtactaacaactcccggacttaatcacgcgttttctagcttattgagtggaaagttcaaaaagtcagacggtagttatcgaacacatcctcactattcatggatgcagaatatttctattcctaggagtgttggattttatccggatcaagtaaagatttcaaagatgttttctgtcagaaaataccatccaagtcaatatctttacttttgttcatcagacgttccggaaagaggtcctcaggtaggtttagtatctcaattgtctgtcttgagttccattacaaatatactaacgtctgagtatttggatttggaaaagaaaatttgtgagtatatcagatcatattataaagatgatataagttactttgaaacaggatttccaatcactatagaaaatgctctagtcgcatctcttaatccaaatatgatatgtgattttgtaactgactttagacgtagaaaacggatgggattcttcggtaacttggaggtaggtattactttagttagggatcacatgaatgaaattcgcattaatattggagcgggaagattagtcagaccattcttggttgtggataacggagagctcatgatggatgtgtgtccggagttagaaagcagattagacgacatgacattctctgacattcagaaagagtttccgcatgtcatcgaaatggtagatatagaacaatttacttttagtaacgtatgtgaatcggttcaaaaatttagaatgatgtcaaaggatgaaagaaagcaatacgatttatgtgactttcctgccgaatttagagatggatatgtagcatcttcattagtgggaatcaatcacaattctggacccagagctattcttggatgtgctcaagctaaacaagctatctcttgtctgagctcggatatacgaaataaaatagacaatggaattcatttgatgtatccagagaggccaatcgtgattagtaaggctttagaaacttcaaagattgcggctaattgcttcggccaacatgttactatagcattaatgtcgtacaaaggtatcaatcaagaggatggaattatcatcaaaaaacaatttattcagagaggcggtctcgatattgttacagccaagaaacatcaagtagaaattccattggaaaactttaataacaaagaaagagataggtctaacgcctattcaaaattagaaagtaatggattagttagactgaatgctttcttggaatccggagacgctatggcacgaaatatctcatcaagaactcttgaagatgattttgctagagataatcagattagcttcgatgtttccgagaaatataccgatatgtacaaatctcgcgttgaacgagtacaagtagaacttactgacaaagttaaggtacgagtattaaccatgaaagaaagaagacccattctaggagacaaatttaccactagaacgagtcaaaagggaacagtcgcgtatgtcgcggatgaaacggaacttccatacgacgaaaatggtatcacaccagatgtcattattaattctacatccatcttctctagaaaaactatatctatgttgatagaagttattttaacagccgcatattctgctaagccgtacaacaataagggagaaaaccgacctgtctgttttcctagtagtaacgaaacatccatcgatacatatatgcaattcgctaaacaatgttatgagcattcaaatccgaaattgtccgatgaagaattatcggataaaatcttttgtgaaaagattctctatgatcctgaaacggataagccttatgcatccaaagtattttttggaccaatttattacttgcgtctgaggcatttaactcaggacaaggcaaccgttagatgtagaggtaaaaagacgaagctcattagacaggcgaatgagggacgaaaacgtggaggaggtatcaagttcggagaaatggagagagactgtttaatagcgcatggtgcagccaatactattacagaagttttgaaagattcggaagaagattatcaagatgtgtatgtttgtgaaaattgtggagacatagcagcacaaatcaagggtattaatacatgtcttagatgttcaaaacttaatctctctcctctcttaacaaaaattgataccacgcacgtatctaaagtatttcttactcaaatgaacgccagaggcgtaaaagtcaaattagatttcgaacgaaggcctccttcgttttataaaccattagataaagttgatctcaagccgtcttttctggtgtaatattctagtttggtagtagatacatatcaatatcatcaaattcgagatccgaattataaaatgggcgtggattgttaactatagaatcggacgtctgatattcgaaaatctgtggagtttcaggttttggtggaggtgtaactgctacttgggatactgaagtctgatattcagaaagctgtggatgttctggttcggcatccaccgatggtgtcacatcactaatcggttcggtaacgtctgtggatggaggtgctacttctacagaacctgtagcctcagttgtcaacggagatacatttttaatgcgagaaaatgtataatttggtaatggtttcttatgtggatctgaagaagaggtaagatatctactagaaagataccgatcacgttctagttctcttttgtagaacttaactttttctttctccgcatctagttgatattccaacctcttcacgttactacgttcagattccaattcacgttcgcatgggttacctccgcagtttttacgagcgatttcacgttcagccttcatgcgtctctccctctctctatcgagtttatcagagcagtctttctgaaggcgatcgaactccataaatttctccaacgctttgattgtttccatagatttccgaagttcagcttttaggactgtgattctttttctttcgaattcacagctggatgtacaaccgtttccattaccgccatctctaagtttcttttctagatcggcaacatttcatccccatgccttttacattcctcgagtctactgtcgtcgaaatatcgttccagctccttttcgacatcaataactttagcacgttgtctctcaagctctcttttgtagttatctgattccctggcacgtttaagatcttcatgcaattgagtcagctcttaacttcctctcttgcttcttcgtcatagtacgcgcaatcactgtgagatccattgttaccacgtctacactcggcgagctcgcgtttaagagattcaatttcccgtttgtattggtccatgtttccattgctaccaccattagatttacaggctgctagttgtcgttcgagatcagaaatacgggttttcttggaattgatttcgtcgatgtacttggcatcgaaacacttattaagttctttttccaattctacgattttatttctttcgcgagtcaattccctcctgtagtaactatctgttttgtcagattcacgctctctacgtagactttcttgcaagttactaatttgttccctagcacgtccgagtttagttttatatgctgaatagagttctgattcatcctttgagcagatctctagcgatcgtttaagattcctaattctagtctttagcctatttacctcctcagaagatgttccgttaccgttgcgtttacactcgttaagctgtctatcaagatccatgattctatctctaagacgttgcatctctctttccatatcagcattgctttcattattacgtctgcagtcactcaactgtctttcaatatctgagattctatctctaagacgtcgcatctctctctgtttcggcattggtttcattattacgtttacagtcgttcaactgtctttcaagatctgatattctagattggagtctgctaatctctgtagcattttcacggcattcactcagttgtctttcaagatctgaaattttagattggagtctgctaatctctgtaagatttcctcctccgctctcgatgcagtcggtcaacttattctctagttctctaatacgcgaacgcagtgcatcaacttcttgcgtgtcttcctggttgcgtgtacattcatcgagatctctaacgcgtcgtcgttcttcctcaagttctctgcgtactacagaaagcgtgtccctatcttgttgatatttagcaatttctgattctagagtactgattttgcttacgtagttactaatagttgtcttggccttatcaagatcctccttgtatttgtcgcattccttgatatccctacgaagtctggacagttcccattcgacattacgacgtttatcgatttcagctcggagatcgtcatcgcgttgttttagccacatacgactgagttcaagttctcgttgacaagatccatctacttttccattcctaatagtatccagttccttttctagttctgaacgcatttctcgttccctatcaagcgattctctcaattctcggatagtcttcttatcaatttctaataaatctgaaccatcatctgtcccattttgaatatccctgtgttctttgatctcttttgtaagtcggtcgattctttcggttttataaacagaatccctttccaaagtcctaatcttactgagtttatcactaagttctgcattcaattcggtgagttttctcttggcttcttccaactctgttttaaactctccactatttccgcattcttcctcgcatttatctaaccattcaattagtttattaataactagttggtaatcagcgattcctatagccgttcttgtaattgtgggaacataattaggatcttctaatggattgtatggcttgatagcatcatctttatcattattagggggatggacaaccttaattggttggtcctcatctcctccagtagcgtgtggttcttcaataccagtgttagtaataggcttaggcaaatgcttgtcgtacgcgggcacttcctcatccatcaagtatttataatcgggttctacttcagaatattcttttctaagagacgcgacttcgggagttagtagaagaactctgtttctgtatctatcaacgctggaatcaatactcaagttaaggatagcgaatacctcatcgtcatcatccgtatcttctgaaacaccatcatatgacatttcatgaagtctaacgtattgataaatagaatcagatttagtattaaacagatccttaacctttttagtaaacgcatatgtatattttagatctccagatttcataatatgatcacatgccttaaatgtcagtgcttccatgatataatctggaacactaatgggtgacgaaaaagatacagcaccatatgctacgttgataaataaatctgaaccactaagtagataatgattaatgttaagaaagaggaaatattcagtgtataggtatgtcttggcgtcatatcttgtactaaacacgctaaacagtttgttaatgtgatcaatttccaatagattaattagagcagcgggaataccaacaaacatattaccacatccgtattttctatgaatatcacatatcatgttaaaaaatcttgatagaagagcgaatatctcgtctgacttaatgagtcgtagttcagcagcaacataagtcataactgtaaatagaacatactttcctgtagtgttgattctagactccacatcaacaccattattaaaaatagttttatatacatctttaatctgctctccgttaatcgtcgaacgttctagtatacggaaacactttgatttcttatctgtagttaatgacttagtgatatcacgaagaatattacgaattacatttcttgtttttcttgagagacctgattcagaactcaactcatcgttccatagtttttctacctcagtggcgaaatctttggagtgcttggtacatttttcaataaggttcgtgacctccatttattataaaaaatttattcaaaacttaactacaatcgggtaattataagatcgtagatctcccatgtggcggaatactaccatctatcgcatgtggatggacagtaggtaatggccatgggaacagtaatgtttgcatatttatctttcttgctagtattactgcatattgtcccaatgtttcgatgtgatgttctaacctatcaactgccgctgtatcacaacaatagtgtccgatgaaattaagattatgatccaatgtgtttaatatatgattatcaagtcttatacgatccgcgtcttttttgacaggatcaggttcttctacaggaagaagtttcggcctcttatgatattcatgtctgggaaacggtggtctagggtgaggctccggtatcggagtgggttttggattataatcatcatcgtctatgacatcatcttcgacttcgatatttattttgctatcttgatgatgtcctgtatcagttgcattttcagcactcgactgaatattagcgcattcattgtctattattaccatatttctaaacccaaaatgtatgtgttgaacatcagtactatcgttgatgagtcttatagcatgaattcgcttatcgttatcgggtttatcttctgtcaccttagcaattccttttttattaaactctacataatcatatccatttctattgtttgttctaatataaacgagtatagcatcattgctaaatttttcaatagtatcaaaaacagaatatcctaaaccatataatatatattcaggaacactcaaactaaatgtccaggattctcctaaatacgtaaactttaatagtgcgaaatcattcaaaaatctaccacttatagatagatagtacataaatgcgtatagtagtctacctatctctttattatgaaaaccggcattacgatcatatatgtcgtgatatacctgtgatccgtttacgttaaaccataaatacatgggtgatcctataaacatgaatttatttctaattctcagagctatagttaattgaccgtgtaatatttgcttacatgcatacttgatacgcttattaataagatttttatcattgctcgttatttcagaatcgtatatataaggagtaccatcgtgattcttaccagatattatacaaaatactatatataaaatatattgacccacgttagtaatcatataaatgtttaacgttttaaattttgtattcaatgatccattatcatacgctatcatggtcttgtaatattcattctttaaaatataatattgtgttagccattgcattggagctcctaatggagattttctattctcatccattttaggataggctttcataaagtccctaataacttcgtgaataatgtttctatgttttctactgatgcatgtatttgcttcgatttttttatcccatgtttcatctatcatagatttaaacgcagtaatgctcgcaacattaacatcttgaaccgttggtacaattccgttccataaatttataatgttcgccatttatataactcattttttgaatatacttttaattaacaaaagagttaagttactcatatggacgccgtccagtctgaacatcaatctttttagccagagatatcatagccgctcttagagtttcagcgtgattttccaacctaaatagaacttcatcgttgcgtttacaacacttttctatttgttcaaactttgttgttacattagtaatctttttttccaaattagttagccgttgtttgagagtttcctcattgtcgtcttcatcggctttaacaattgcttcgcgtttagcctctggctttttagcagcctttgtagaaaaaaattcagttgctggaattgcaagatcgtcatctccggggaaaagagttccgtccatttaaagtacagattttagaaactgacactctgcgttatttatatttggtacaacacatggattataaatattgatgttaataacatcagaaaatgtaaagtctatacattgttgcatcgtgttaaattttctaatggatctagtattattgggtccaacttctgcctgaaatccaaatatggaagcggatacaaaaccgtttcctggataaaccacacatctccacttttgctttacatcagaaattgtgtcgttgacatcttgaactctcctatctaatgccggtgttccacctatagattttgaatattcgaatgctgcatgagtagcattaaattccttaatattgccataattttcatatattgagtaaccctggataaaaagtaaacacaccgcagccgtcgctaccacaataaaaaaaattgatagagagttcatttataatctattagaagctgacaaaatttttttacacgcatcagacaatgctttaataaatagttcaacatctacttttgtcatatcgaaccgatggtatgattctaacctagaattacatccgaaaaagttgactatgttcatagtcattaagtcattaacaaacaacattccagactctggattataagacgatactgtttcgtcacaattacctaccttaatcatgtgattatgaatattggctattagagcaccttctaagaaatctataatatctttgaaacacgatttaaaatcaaaccacgaatatacttctacgaagaaagttagtttacccataggagaaataactataaatggagatctaaatacaaaatccggatctatgatagttttaacattattatattctctattaaatacctccacatctaaaaatgttaattttgaaactatgtcttcgtttattaccgtacctgaactaaacgctataagctctattgtttgagaactctttaaacgatattcttgaaatacatgtaacaaagtttcctttaactcggtcggtttatctaccatagttacagaatttgtatccttatctataatataataatcaaaatcgtataaagttatataattatcgcgttcagattgtgatcttttcaaatagactaaaaaccccatttctctagtaagtatcttatgtatatgtttgtaaaatatcttcatggtgggaatatgctctaccgcagttagccattcctcattgacagcggtagatgtattagacaaaactattccaatgtttaacaagggccattttacgagattattaaatccttgtttgataaatgtagccaatgagggttcgagttcaacgacgattgaattctcttcccgcggatgctgcatgatgaacgacgggatgttgttcgattgatttggaattctttttcgactttttgtttatattaaatattttaaaatttatagcggatagcaattcatgtaccacggataatgtagacgcgtattgcgcatcgatatctttattattagataaatttatcaataaatgtgagaagtttgcctcgttaaggtcttccatttaaatattatataaacatttgtgtttgtatcttattcgtcttttatggaatagttttttactagtaaagctgcaattacacactttgtccgtaaaacataaatataaacaccagcttttatcaatcgttccaaaaagtcgacggcggacatttttaacatggcatctattttaaatacacttaggtttttggaaaaaacatcattttataattgtaacgattcaataactaaagaaaagattaagattaaacataagggaatgtcatttgtattttataagccaaagcattctaccgttgttaaatacttgtctggaggaggtatatatcatgatgatttggttgtattggggaaggtaacaattaataatctaaagatgatgctattttacatggatttatcatatcatggagtgacaagtagtggagcaatttacaaattgggatcgtctatcgatagactttctctaaataggactattgttacaaaagttaataattatgatgatacattttttgacgacgatgattgatcgctattgcacaattttgtttttgtactttctaatatagtgtttaggttctttttcatatgagaatattgatttactaaaatatctatgtttaacttttgttctatgacgtccttatcggcggtatcggtacatatacgtaattcaccttcacaaaatacggagtcttcgataataatagccaatcgattattggatctagctgtctgtatcatattcaacatgtttaatatatcctttcgtttcccctttacaggcatcgatcgtagcatattttccgcgtctgatatggaaatgttaaaactacaaaaatgcgtaatgttagcccgtcctaatattggtacgtgtctataagtttggcatagtagaataatagacgtgtttaaatgccttccaaagtttaagaattctattagagtattgcattttgatagtttatcgcctacatcatcaaaaataagtaaaaagtgtgctgattttttatgattttgtgcgacagcaatacatttttctatgttacttttagttcgtatcagattatattctagagattcctgactactaacgaaattaatatgatttggccaaatgtatccatcataatctgggttataaacgggtgtaaacaagaatatatgtttatattttttaactagtgtagaaaacagagatagtaaatagatagtttttccagatccagatcctcctgttaaaaccattctaaacggcatttttaataaattttctcttgaaaattgtttttcttggaaacaattcataattatatttacagttactaaattaatttgataataaatcaaaatatggaaaactaaggttgttagtagggaggagaacaaagaaggcacatcgtgatataaataacatttattatcatgatgacaccagaaaacgacgaagagcagacatctgtgttctccgctactgtttacggagacaaaattcagggaaagaataaacgcaaacgcgtgattggtctatgtattagaatatctatggttatttcactactatctatgattaccatgtccgcgtttctcatagtgcgcctaaatcaatgcatgtctgctaacgaggctgctattactgacgccgctgttgccgttgctgctgcatcatctactcatagaaaggttgcgtctagcactacacaatatgatcacaaagaaagctgtaatggtttatattaccagggttcttgttatatattacattcagactaccagttattctcggatgctaaagcaaattgcactgcggaatcatcaacactacccaataaatccgatgtcttgactacctggctcattgattatgttgaggatacatggggatctgatggtaatccaattacaaaaactacatccgattatcaagattctgatgtatcacaagaagttagaaagtatttttgtgttaaaacaatgaactaatatttatttttgtacattaataaatgaaatcgcttaatagacaaactgtaagtaggtttaagaagttgtcggtgccggccgctataatgatgatactctcaaccattattagtggcataggaacatttctgcattacaaagaagaactgatgcctagtgcttgcgccaatggatggatacaatacgataaacattgttatttagatactaacattaaaatgtctacagataatgcggtttatcagtgtcgtaaattacgagctagattgcctagacctgatactagacatctgagagtattgtttagtattttttataaagattattgggtaagtttaaaaaagaccaatgataaatggttagatattaataatgataaagatatagatattagtaaattaacaaattttaaacaactaaacagtacgacggatgctgaagcgtgttatatatacaagtctggaaaactggttaaaacagtatgtaaaagtactcaatctgtactatgtgttaaaaaattctacaagtgacaacaaaaaatgaattaataataagtcgttaacgtacgccgccatggacgccgcgtttgttattactccaatgggtgtgttgactataacagatacattgtatgatgatctcgatatctcaatcatggactttataggaccatacattataggtaacataaaaactgtccaaatagatgtacgggatataaaatattccgacatgcaaaaatgctactttagctataagggtaaaatagttcctcaggattctaatgatttggctagattcaacatttatagcatttgtgccgcatacagatcaaaaaataccatcatcatagcatgcgactatgatatcatgttagatatagaagataaacatcagccattttatctattcccatctattgatgtttttaacgctacaatcatagaagcgtataacctgtatacagctggagattatcatctaatcatcaatccttcagataatctgaaaatgaaattgtcgtttaattcttcattctgcatatcagacggcaatggatggatcataattgatgggaaatgcaatagtaattttttatcataaaagttgtaaagtaaataataaaacaataaatattgaactagtagtacgtatattgagcaatcagaaatgatgctggtacctcttatcacggtgaccgtagttgcgggaacaatattagtatgttatatattatatatttgtaggaaaaagatacgtactgtctataatgacaataaaattatcatgacaaaattaaaaaagataaagagttctaattccagcaaatctagtaaatcaactgatagcgaatcagactgggaggatcactgtagtgctatggaacaaaacaatgacgtagataatatttctaggaatgagatattggacgatgatagcttcgctggtagtttaatatgggataacgaatccaatgttatggcgcctagcacagaacacatttacgatagtgttgctggaagcacgctgctaataaataatgatcgtaatgaacagactatttatcagaacactacagtagtaattaatgaaacggagactgttgaagtacttaatgaagataccaaacagaatcctaactattcatccaatcctttcgtaaattataataaaaccagtatttgtagcaagtcaaatccgtttattacagaacttaacaataaatttagtgagaataatccgtttagacgagcacatagcgatgattatcttaataagcaagaacaagatcatgaacacgatgatatagaatcatcggtcgtatcattggtgtgattagtttcctttttataaaattgaagtaatatttagtattattgctgccgtcacgttgtacaaatggagatattccctgtattcggcatttctaaaattagcaattttattgctaataatgactgtagatattatatagatacagaacatcaaaaaattatatctgatgagatcaatagacagatggatgaaacggtacttcttaccaacatcttaagcgtagaagttgtaaatgacaatgagatgtaccatcttattcctcatagattatcgacgattatactctgtattagttctgtcggaggatgtgttatctctatagataatgacatcaatggcaaaaatattctaacctttcccattgatcatgctgtaatcatatccccactgagtaaatgtgtcgtagttagcaagggtcctacaaccatattggttgttaaagcggatatacctagcaaacgattggtaacatcgtttacaaacgacatactatatgtaaacaatctgtcactgattaattatttgccgttgtctgtattcattattagacgagtcaccgactatttggatagacacatatgcgatcagatatttgctaataataagtggtattcccttataaccatcgacgataagcaatatcctattccatcaaactgtataggtatgtcctctgccaagtacataaattctagcatcgagcaagatactttaatccatgtttgtaacctcgagcatccgttcgactcagtatacaaaaaaatgcagtcgtacaattctctacctatcaaggaacaaatattgtacggtagaattgataatataaatatgagcattagtatttctgtggattaatagatttctagtatggggatcattaatcatctctaatctctaaatacctcataaaacgaaaaaaaagctattatcaaatactgtacggaatggattcattctcttctctttttatgaaactctgttgtatatctactgataaaactggaagcaaaaaatctgatagaaagaataagaataagatcaaggattatatggaacacgattattataaaataacaatagttcctggttcctcttccacgtctactagctcgtggtattatacacatgcctagtaatagtctctttgcgttgacggaaagcagactagaaataacaggctaaaatgttcagacaccataatagttcccaacccagataataacagagttccatcaacacattcctttaaactcaatcccaaacccaaaaccgttaaaatgtatccggccaattgatagtagataatgaggtgtacagcgcatgataatttacacagtaaccaaaatgaaaatactttagtaattataagaaatatagacggtaatgtcatcatcaacaatccgataatatgcctgagagtaaacattgacggataaaacaaaaatgctccgcataactctatcatggcaataacacaaccaaatacttgtaagattcctaaattagtagaaaatacaacgaatatcgatgtataagtgatctcgagaaataataagaataaagtaatgcccgtaaagataaacatcaacattgtttggtaatcattaaaccaattagtatgaagttgaactaatttcacagtagattttattccagtgttatcctcgcatgtataagtacctggtaagatatctttatattccataatcaatgagacatcactatctgataacgaatgaagtctagcactagtatgccatttacttaatattgtcgtcttggaagttttattataagttaaaatatcatggttatccaatttccatctaatatactttgtcggattatctatagtacacggaataatgatggtatcattacatgctgtatactctatggtctttgtagttgttataacaaccaacgtatagaggtatatcaacgatattctaactcttgacattttttatttatttaaaatgatacctttgttatttattttattctattttgctaacggtattgaatggcataagtttgaaacgagtgaagaaataatttctacttacttattagacgacgtattatacacgggtgttaatggggcggtatacacattttcaaataataaactaaacaaaactggtttaactaataataattatataacaacatctataaaagtagaggatgcggataaggatacattagtatgcggaaccaataacggaaatcccaaatgttggaaaatagacggttcagacgacccaaaacatagaggtagaggatacgctccttatcaaaatagcaaagtaacgataatcagtcacaacggatgtgtactatctgacataaacatatcaaaagaaggaattaaacgatggagaagatttgacggaccatgtggttatgatttattcacggcggataacgtaattccaaaagatggtttacgaggagcattcgtcgataaagacggtacttatgacaaagtttacattcttttcactgatactatcggctcaaagagaattgtcaaaattccgtatatagcacaaatgtgcctaaacgacgaaggtggtccatcatcattgtctagtcatagatggtcgacgtttctcaaagtcgaattagaatgtgatatcgacggaagaagttatagacaaattattcattctagaactataaaaacagataatgatacgatactatatgtattcttcgatagtccttattccaagtccgcattatgtacctattctatgaataccattaaacaatctttttctacgtcaaaattggaaggatatacaaagcaattgccgtctccagctcctggtatatgtttaccagctggaaaagttgttccacataccacgtttgaagtcatagaacaatataatgtactagatgatattataaagcctttatctaaccaacctatcttcgaaggaccgtctggtgttaaatggttcgatataaaggagaaggaaaatgaacatcgggaatatagaatatacttcataaaagaaaattctatatattcgttcgatacaaaatctaaacaaactcgtagctcgcaagtcgatgcgcgactattttcagtaatggtaactgcgaaaccgttatttatagcagatatagggataggagtaggaatgccacaaatgaaaaaaatacttaaaatgtaatcttaatcgagtacaccacacgacaatgaacaaacataagacagattatgctggttatgcttgctgcgtaatatgcggtctaattgtcggaattatttttacagcgacactattaaaagttgtagaacgtaaattagttcatacaccattaatagataaaacgataaaagatgcatatattagagaagattgtcctactgactggataagctataataataaatgtatccatttatctactgatcgaaaaacctgggaggaaggacgtaatgcatgcaaagctctaaattcaaattcggatctaattaagatagagactccaaacgagttaagttttttaagaagccttagacgaggctattgggtaggagaatccgaaatattaaaccagacaaccccatataattttatagctaagaatgccacgaagaatggaactaaaaaacggaaatatatttgtagcacaacgaatactcccaaactgcattcgtgttacactatataacaattacactacatttttatcataccactacttcggttagatgttttagaaaaaaataaatatcgccgtaccgttcttgtttttataaaaataacaattaacaattatcaaattttttctttaatattttacgtggttgaccattcttggtggtaaaataatctcttagtgttggaatggaatgctgtttaatgtttccacactcatcgtatattttgacgtatgtagtcacatcgtttacgcaatagtcagactgtagttctatcatgcttcctacatcagaaggaggaacagttttaaagtctcttggttttaatctattaccgttagttttcatgaaatcctttgttttatccacttcacattttaaataaatgtccactatacattcttttgttaattttactagatcgtcatgggtcatagaatttataggttccgtagtccatggatccaaactagcaaacttcgcgtatacggtatcgcgattagtgtatacaccaactgtatgaaaattaagaaaacagtttaataaatcaacagaaatatttaatcctccgtttgatacagatgcgccatatttatggatttcggattcacacgttgtttgtctgaggtgttcgtctagtgttgcttctacgtaaacttcgattcccatatattctttattgtcagaatcgcataccgatttatcatcatacactgtttgaaaactaaatggtatacacatcaaaataataaataataacgagtacattctgcaatattgttatcgtaattggaaaaatagtgttcgagtgagttggattatgtgagtattggattgtatattttattttatattttgtaataagaataaaatgctaatgtcaagtttattccaatagatgtcttattaaaaacatatataataaataacaatggctgaatggcataaaattatcgaggatatctcaaaaaataataagttcgaggatgccgccatcgttgattacaagactacaaagaatgttctagctgctattcctaacagaacatttgccaagattaatccgggtgaaattattcctctcatcactaatcgtaatattctaaaacctcttattggtcagaaatattgtattgtatatactaactctctaatggatgagaacacgtatgctatggagttgcttactgggtacgcccctgtatctccgatcgttatagcgagaactcataccgcacttatatttttgatgggtaagccaacaacatccagacgtgacgtgtatagaacgtgtagagatcacgctacccgtgtacgtgcaactggtaattaaaataaaaagtaatattcatatgtagtgtcaattttaaatgatgatgatgaaatggataatatccatattgacgatgtcaataatgccggtattggcatacagttcatcgatttttagatttcattcagaggatgtggaattatgttatgggcatttgtattttgataggatctataatgtagtaaatataaaatataatccgcatattccatatagatataattttattaatcgcacgttaaccgtagatgaactagacgataatgtcttttttacacatggttattttttaaaacacaaatatggttcacttaatcctagtttgattgtctcattatcaggaaacttaaaatataatgatatacaatgctcagtaaatgtatcgtgtctcattaaaaatttggcaacgagtacatctactatattaacatctaaacataagacttattctctacatcggtccacgtgtattactataataggatacgattctattatatggtataaagatataaatgacaagtataatgacatctatgattttactgcaatatgtatgctaatagcgtctacattgatagtgaccatatacgtgtttaaaaaaataaaaatgaactcttaattatgctatgctattagaaatggataaaatcaaaattacggttgattcaaaaattggtaatgttgttaccatatcgtataacttggaaaagataactattgatgtcacacctaaaaagaaaaaagaaaaggatgtattattagcgcaatcagttgctgtcgaagaggcaaaagatgtcaaggtagaagaaaaaaatattatcgatattgaagatgacgatgatatggatgtagaaagcgcgtaatacgatctataaaaataagtatataaatactttttatttactgtactcttactgtgtagtggtgataccctactcgattatttttttaaaaaaaaaatacttattctgattcttctagccatttccgtgttcgtttgaatgccacatcgacgtcaaagataggggagtagttgaaatctagttctgcattgttggtacgcacctcaaatgtagtgttggatatcttcaacgtatagttgttgagtagtgatggttttctaaatagaattctcttcatatcattcttgcacgcgtacatttttagcatccatcttggaatcctagatccttgttctattcccaatggtttcatcaatagaagattaaacatatcgtacgaacacgatggagagtaatcgtagcaaaagtaagcatttcctttaatcttagatcccggatactggatatattttgcagccaacacgtgcatccatgcagcatttcctacatatacccggctatgcaccgcgtcatcatcgactgtacgatacataatgttaccgtgttgcttacattgctcgtaaaagactttcatcaatttgtctccttctccgtaaattccagtgggtcttaggcaacaagtatacaattttgctccattcatgattacggaattattggctttcataaccagttgctcggccatacgtttactttttgcgtatacatgtcctggtgatatatcataaagggtatgctcatggccgatgaatggatcaccgtgtttattgggtcctattgcttccatgctactagtatagatcaaatacttgattcctaggtccacacaagctgccaaaatagtctgtgttccataatagtttactttcatgatttcattatcggtgtattttccaaatacatccactagagcagccgtatgaataatcagatttaccccatctagcgcttctctcaccttatcaaagtcgtttatatcacattgtatatagtttataaccttaactttcgaggttattggttgtggatcttctacaatatctatgactctgatttcttgaacatcatctgcactaattaacagttttactatatacctgcctagaaatccggcaccaccagtaaccgcgtacacggccattgctgccactcataatatcagactacttattctattttactaaataatggctgtttgtataatagaccacgataatatcagaggagttatttactttgaaccagtccatggaaaagataaagttttaggatcagttattggattaaaatccggaacgtatagtttgataattcatcgttacggagatattagtcaaggatgtgattccataggcagtccagaaatatttatcggtaacatctttgtaaacagatatggtgtagcatatgtttatttagatacagatgtaaatatatttacaattattggaaaggcgttatctatttcaaaaaatgatcagagattagcgtgtggagttattggtatttcttacataaatgaaaagataatacattttcttacaattaacgagaatggcgtttgatatatcagttaatgcgtctaaaacaataaatgcattagtttacttttctactcagcaaaataaattagtcatacgtaatgaagttaatgatacacactacactgtcgaatttgatagggacaaagtagttgacacgtttatttcatataatagacataatgacaccatagagataagaggggtgcttccagaggaaactaatattggttgcgcggttagtatgacttacttgtataataagtatagttttaaactgattttagcagaatatataagacacagaaatactatatccggcaatatttattcggcattgatgacactagatgatttggctattaaacagtatggagacattgatctattatttaatgagaaacttaaagtagactccgattcgggactatttgactttgtcaactttgtaaaggatatgatatgttgtgattctagaatagtagtagctctatctagtctagtatctaaacattgggaattgacaaataaaaaatataggtgtatggcattagccgaacatatatctgatagtattccaatatctgagctatctagactacgatacaatctatgtaagtatctacgcggacacactgagagcatagaggataaatttgattattttgaagacgatgattcgtctacatgttctgccgtaaccgacagggaaacggatgtataattttttttatagcgtgaaggatatgataaaaaatataattgttgtatttatcccattccaatcaccttatatgattctgtaacacaataaaggagtcttatagatgtatagaggtcagatactggtttgataaactgtttattccacataagtatgtttgactttatggttagacccgcatactttaacaaatcactgaaaattggagttaggtattgacctctcagaatcagttgccgttctggaacattaaatgtattttttatgatatactccaacgcatttatgtgggcatacaacaagtcattactaatggaatattccaagagttttagttgtctagtatttaacaagagaagagatttcaacagactgtttatgaactcgaatgccgcctcattgtcgcttatattgatgatgtcgaattctcccaatatcatcaccgatgagtagctcatcttgttatcgggatccaagttttctaaagatgtcattaaaccctcgatcatgaatggatttatcatcatcgtttttatgttggacatgagcttagtccgtttgtccacatctatagaagatgatttctgaattatttcatatatctctctctttaactccaggaacttgtcaggatggtctactttaatatgttctcgtctaagagatgaaaatctttggatggttgcacgcgacttttctctaaaggatgacgttgcccaagatcctctcttaaatgaatccatcttatccttggacaagatggacagtctattttccttagatggtttaatatttttgttacccatgatctataaaggtagacctaatcgtctcggatgaccatatatttattttcagttttattatacgcataaattgtaaaaaatatgttaggtttacgaaaatgtctcgtggggcattaatcgtttttgaaggattggacaaatctggaaaaacaacacaatgtatgaacatcatggaatcaataccttcaaacacaataaaataccttaactttcctcagagatccactgtcactggaaagatgatagatgactatctaactcgtaaaaaaacctataatgatcatatagttaatctattattttgtgcaaatagatgggagtttgcatcttttatacaagaacaactagaacagggaattactttaatagttgatagatacgcattttctggagtagcgtatgccgccgctaaaggcgcgtcaatgactctcagtaagagttatgaatctggattgcctaaacccgacttagttatattcttggaatctggtagcaaagaaattaatagaaacgtcggtgaggaaatttatgaagatgttacattccaacaaaaggtattacaagaatataaaaaaatgattgaagaaggagatattcattggcaaattatttcttctgaattcgaggaagatgtaaagaaggagttgattaagaatatagttatagaggctatacacacggttactggaccagtggggcaactgtggatgtaatagtgaaattacattttttataaatagatgttagtacagtgttataaatggatgaagcatattactctggcaacttggaatcagtactcggatacgtgtccgatatgcataccgaactcgcatcaatatctcaattagttattgccaagatagaaactatagataatgatatattaaacaaggacattgtaaattttatcatgtgtagatcaaacttggataatccatttatctctttcctagatactgtatatactattatagatcaagagaactatcagactgagttgattaattcattagacgacaatgaaattatcgattgtatagttaataagtttatgagcttttataaggataacctagaaaatatagtagatgctatcattactctaaaatatataatgaataatccagattttaaaactacgtatgccgaagtactcggttccagaatagccgatatagatattaaacaagtgatacgtaagaatatactacaattgtctaataatatccgcgaacgatatttgtgaaaatattaaaaaaaaatactttttttattaaatgacgtcttttcgtgaatttagaaaattatgctgtgctatatatcacgcatcaggatataaagaaaaatctaaattaattagagactttataacagatagggatgataaatatttgatcattaagctattgcttcccggattagacgatagaatttataacatgaacgataaacaaattataaaattatatagtataatatttaaacaatctcaggaagatatgctacaagatttaggatacggatatataggagacactattaggactttcttcaaagagaacacagaaatccgtccacgagataaaagcattttaactttagaagaagtggatagttttttaactacgttatcatccgtaactaaagaatcgcatcaaataaaattattgactgatgtagcatctgtttgtacatgtaatgatttaaaatgtgtagtcatgcttattgataaagatctaaaaattaaagcgggtcctcggtacgtacttaacgctattagtcctaatgcctatgatgtgtttagaaaatctaataacttgaaagagataatagaaaattcatctaaacaaaatctagactctatatctatttctgttatgactccaattaatcccatgttagcggaatcgtgtgattctgtcaataaggcgtttaaaaaatttccatcaggaatgtttgcggaagtcaaatacgatggtgaaagagtacaagttcataaaaataataacgagtttgccttctttagtagaaacatgaaaccagtactctctcataaagtggattatctcaaagaatacataccgaaagcatttaaaaaagctacgtctatcgtattggattctgaaattgttcttgtagacgaacataatgtaccgctcccgtttggaagtttaggtatacacaaaaagaaagaatataaaaactctaacatgtgtttgttcgtgtttgactgtttgtactttgatggattcgatatgacggacattccattgtacgaacgaagatcttttctcaaagatgttatggttgaaatacccaatagaatagtattctcagagttgacgaatattagtaacgagtctcagttaactgacgtattggatgatgcactaacgagaaaattagaaggattggtcttaaaagatattaatggagtatacgaaccgggaaagagaagatggttaaaaataaagcgagactatttgaacgagggttccatggcagattctgccgatttagtagtactaggtgcctactatggtaaaggagcaaagggtggtatcatggcagtctttctaatgggttgttacgacgatgaatccggtaaatggaagacggttaccaagtgttcaggacacgatgataatacgttaagggagttgcaagaccaattaaagatgattaaaattaacaaggatcccaaaaaaattccagagtggttagtagttaataaaatctatattcccgattttgtagtagaggatccgaaacaatctcagatatgggaaatttcaggagcagagtttacatcttccaagtcccataccgcaaatggaatatccattagatttcctagatttactaggataagagaggataaaacgtggaaagaatctactcatctaaacgatttagtaaacttgactaaatcttaatagttacatacaaactgaaaattaaaataacactatttagttggtggtcgccatggatggtgttattgtatactgtctaaacgcgctagtaaaacatggcgaggaaataaatcatataaaaaatgatttcatgattaaaccatgttgtgaaagagtttgtgaaaaagtcaagaacgttcacattggcggacaatctaaaaacaatacagtgattgcagatttgccatatatggataatgcggtatccgatgtatgcaattcactgtataaaaagaatgtatcaagaatatccagatttgctaatttgataaagatagatgacgatgacaagactcctactggtgtatataattattttaaacctaaagatgccattcctgttatcatatctataggaaaggataaagatgtctgtgaactattaatctcatcagacatatcgtgtgcatgcgtggagttaaattcatatcacgtagccattcttcccatggatgtttccttttttaccaaaggaaatgcatcattgattattctcctgtttgatttctctatcgatgcggcacctctcttaagaagtgtaaccgataataatgttattatatctagacaccagcgtctacatgacgagcttccgagttccaattggttcaagttttacataagtataaagtccgactattgttctatattatatatggttgttgatggatctgtgatgcatgcgatagctgataatagaactcacgcaattattagcaaaaatatattagacaatactacgattaacgatgagtgtagatgctgttattttgaaccacagattaggattcttgatagagatgagatgctcaatggatcatcgtgtgatatgaacagacattgtattatgatgaatttacctgatgtaggcgaatttggatctagtatgttggggaaatatgaacctgacatgattaagattgctctttcggtggctggtaatttaataagaaatcgagactacattcccgggagacgaggatatagctactacgtttacggtatagcctctagataatttttttaagcacgaaataaaaaacataattttaaaccaatctatttcatactattttgtgtgatcaccatggacataaagatagatattagtatttctggtgataaatttacggtgactactaggagggaaaatgaagaaagaaaaaaatatctacctctccaaaaagaaaaaactactgatgttatcaaacctgattatcttgagtacgatgacttgttagatagagatgagatgtttactattctagaggaatattttatgtacagaggtctattaggcctcagaataaaatatggacgactctttaacgaaattaaaaaattcgacaatgatgcggaagaacaattcggtactatagaagaactcaagcagaaacttagattaaattctgaagagggagcagataactttatagattatataaaggtacaaaaacaggatatcgtcaaacttactgtatacgattgcatatctatgataggattgtgtgcatgcgtggtagatgtttggagaaatgagaaactgttttctagatggaaatattgtttacgagcgattaaactgtttattgatgatcacatgcttgataagataaaatctatactgcagaatagactagtatatgtggaaatgtcatagaaagttaaaagttaatgagagcaaaaatatataaggttgtattccatatttgttatttttttctgtaatagttagaaaaatacattcgatggtctatctatcagattattatgtgttataaggtactttttctcataataaactagagtatgagtaagatagtgtttttcaaaacatataaatctaaaattgatggatgagatatacagctattaatttcgaaaatatattttaatctgataactttaaacatggatttttaatggtggtttaacgttttaaaaaaagattttgttattgtagtatatgataatattaaaagatggatataaagaatttgctgactgcatgtactattttttacattactacattggctacggcagatatacctacttcgtcactgccacacgctccggtaaacggggcatgtgacgagggagaatatcttgataagaggcataatcaatgttgtaatcagtgtccacctggagaatttgccaaggttagatgtaatggtaacgataacacaaaatgtgaacgctgcccacctcatacatataccgcaatccccaattactctaatggatgtcatcaatgtagaaaatgcccaacaggatcatttgataaggtaaagtgtaccggaacacagaacagtaaatgttcgtgtcttcctggttggtattgcgctactgattcttcacagactgaagattgtcgagattgtataccaaaaaggagatgtccatgcggatactttggtggaatagatgaacaaggaaatcctatttgtaaatcgtgttgtgttggtgaatattgcgactacctacgtaattatagacttgatccatttcctccatgcaaactatctaaatgtaattaattatgattttgatgataatgttaccatacattatatcgctacttggttagtgtattattcagtatgaagacctattaataattacttatcttttgacgatcttgttataattataatataaaaatacttatggcatagtaactcataattgctgacgcgataaattcgtaataatctgttttgttcaaatttttataaggaatctacaggcataaaaataaaaatataatttataatatactcttacagcgcgccatcatgaataacagcagtgaattgattgctgttattaatggatttagaaatagtggacgattttgtgatattaatatagttattaatgatgaaaggataaacgctcacagactcatcctatctggagcctccgaatatttttccattctgttttccaataattttatcgattctaatgaatacgaagttaatctaagtcatttagattatcaaagtgttaacgatttgatcgattacatttatgggatacctttgagcctaactaacgataacgtgaaatatattctttcaaccgctgattttttacaaattggatctgctattacggagtgtgaaaattacatacttaaaaatctttgttctagaaactgtatcgatttctacatatacgctgataaatataataacaagaaaatagaatcagcgtcgtttaacacaatattacaaaatattttgagactcatcaacgatgaaaactttaaatacttaacagaggaatcaatgataaaaattttaagcgatgatatgttaaatataaaaaatgaggatttcgccccactaattctcattaaatggttagagagtactcaacaaccatgcaccgtcgagttacttaaatgcctcagaatatcattgctttccccacaagttataaaatcactttatagtcatcgactggttagttcaatctacgaatgtataacattcttaaacaatatagcattcttggatgaatcatttcctagataccatagcatcgagttgatatctatcggtataagtaattcgcatgataagatttccataaactgctacaatcataaaaaaaatacatgggaaatgatatcttcacgtagatataggtgtagtttcgcagtggccgtcctggataatattatctatatgatgggtggatatgatcagtccccgtatagaagttcaaaggttatagcgtacaatacatgtacaaattcttggatatatgatataccagagctaaaatatcctcgttctaattgtgggggactggctgatgacgaatacatttattgtataggcggcatacgcgatcaggattcatcgttgacatctagtattgatagatggaagccatcaaaaccatattggcagaagtatgctaaaatgcgcgaaccaaaatgtgatatgggggttgcgatgttaaacggattaatatatgttataggtggaatcgttaaaggtgacacgtgtaccgacgcactagagagtttatcagaagatggatggatgaagcatcaacgtcttccaataaaaatgtccaatatgtcgacgattgttcatgatggcaagatttatatatctggaggttacaacaatagtagtgtagttaatgtaatatcgaatctagtccttagctataattcgatatatgatgaatggaccaaattatcatcattaaacattcctagaattaatcccgctctatggtcagcgcataataaattatatgtaggaggaggaatatctgatgatgttcgaactaatacatctgagacatacgacaaagaaaaagattgttggacattggataatggtcacgtgttaccacgcaattatataatgtataaatgcgaaccgattaaacataaatatccattggaaaaaacacagtacacgaatgattttctaaagtatttggaaagttttataggtagttgatagaacaaaatacataattttgtaaaaataaatcactttttatactaatatgacacgattaccaatacttttgttactaatatcattagtatacgctacaccttttcctcagacatctaaaaaaataggtgatgatgcaactctatcatgtaatcgaaataatacaaatgactacgttgttatgagtgcttggtataaggagcccaattccattattcttttagctgctaaaagcgacgtcttgtattttgataattataccaaggataaaatatcttacgactctccatacgatgatctagttacaactatcacaattaaatcattgactgctagagatgccggtacttatgtatgtgcattctttatgacatcaactacaaatgacactgataaagtagattatgaagaatactccacagagttgattgtaaatacagatagtgaatcgactatagacataatactatctggatctacacattcaccggaaactagttctgagaaacctgattatatagataattctaattgctcgtcggtattcgaaatctaagcttaaaaattgaaattttattttttttttttggaatataaataagctcgaagtcgaccaccatggtgggtgaggatagcgtgctgatcaccgagaacatgcacatgaaactgtacatggagggcaccgtgaacgaccaccacttcaagtgcacatccgagggcgaaggcaagccctacgagggcacccagaccatgaagatcaaggtggtcgagggcggccctctccccttcgccttcgacatcctggctaccagcttcatgtacggcagcaaaacctttatcaaccacacccagggcatccccgacttctttaagcagtccttccctgagggcttcacatgggagaggatcaccacatacgaagacgggggcgtgctgaccgctacccaggacaccagcctccagaacggctgcctcatctacaacgtcaagatcaacggggtgaacttcccatccaacggccctgtgatgcagaagaaaacactcggctgggaggccagcaccgagatgctgtaccccgctgacagcggcctgagaggccatagccagatggccctgaagctcgtgggcgggggctacctgcactgctccctcaagaccacatacagatccaagaaacccgctaagaacctcaagatgcccggcttctacttcgtggacaggagactggaaagaatcaaggaggccgacaaagagacctacgtcgagcagcacgagatggctgtggccaggtactgcgacctgcctagcaaactggggcacagctgattaattaatttttatcgatctaattcaacaatgtctggagagctcggtaccaagcttcgcaggatcccgactccggaaccaattactgataaagaagatcatacagttacagacactgtctcatacactacagtaagtacatcatctggaattgtcactactaaatcaaccaccgatgatgcggatctttatgatacgtacaatgataatgatacagtaccaccaactactgtaggcggtagtacaacctctattagcaattataaaaccaaggactttgtagaaatatttggtattaccgcattaattatattgtcggccgtggcaattttctgtattacatattatatatataataaacgttcacgtaaatacaaaacagagaacaaagtctagatttttgacttacataaatgtctgggatagtaaaatctatcatattgagcggaccatctggtttaggaaagacagccatagccaaaagactatgggaatatatttggatttgtggtgtcccataccactagatttcctcgtcctatggaacgagaaggtgttgattaccattacgttaacagagaggccatctggaagggaatagccgccggaaactttctagaacatactgagtttttaggaaatatttacggaacttctaaaacagctgtgaatacagcggctattaataatcgtatttgtgtgatggatctaaacatcgacggtgttagaagtcttaaaaatacgtacctaatgccttactcggtgtatataagacctacctctcttaaaatggttgagaccaagcttcgtcgtagaaacactgaagctaacgatgagattcatcgtcgtgtgatgttggcaaaaactgacatggatgaggcaggtgaagccggtctattcgacactattatcattgaagatgatgtgaatttagcatatagtaagttaattcagatactacaggaccgtattagaatgtattttaacactaattagagacttaagacttaaaacttgataattaataatataactcgtttttatatgtgtctatttcaacgtctaatgtattagttaaatattaaaacttaccacgtaaaacttaaaatttaaaatgatatttcattgacagatagatcacacattatgaactttcaaggacttgtgttaactgacaattgcaaaaatcaatgggtcgttggaccattaataggaaaaggtggattcggtagtatttatactactaatgacaataattatgtagtaaaaatagagcccaaagctaacggatcattatttaccgaacaggcattttatactagagtacttaaaccatccgttatcgaagaatggaaaaaatctcacaatataaagcacgtaggtcttatcacgtgcaaggcatttggtctatacaaatccattaatgtggaatatcgattcttggtaattaatagattaggtgcagatctagatgcggtgatcagagccaataataatagactaccaaaaaggtcggtgatgttgatcggaatcgaaatcttaaataccatacaatttatgcacgagcaaggatattctcacggagatattaaagcgagtaatatagtcttagatcaaatagataagaataaattatatctagtggattacggattggtttctaaattcatgtctaatggcgaacatgttccatttataagaaatccaaataaaatggataacggtactctagaatttacacctatagattcgcataaaggatacgttgtatctagacgtggagatctagaaacacttggatattgtatgattagatggttgggaggtatcttaccatggactaagatatctgaaacaaagaattgtgcattagtaagtgccacaaaacagaaatatgttaacaatactgcgactttgttaatgaccagtttgcaatatgcacctagagaattgctgcaatatattaccatggtaaactctttgacatattttgaggaacccaattacgacaagtttcggcacatattaatgcagggtgtatattattaagtgtggtgtttggtcgataaaaattaaaaaataacttaatttattattgatctcgtgtgtacaaccgaaatcatggcgatgttttacgcacacgctctcggtgggtacgacgagaatcttcatgcctttcctggaatatcatcgactgttgccaatgatgtcaggaaatattctgttgtgtcagtttataataacaagtatgacattgtaaaagacaaatatatgtggtgttacagtcaggtgaacaagagatatattggagcactgctgcctatgtttgagtgcaatgaatatctacaaattggaaatccgatccatgatcaagaaggaaatcaaatctctatcatcacatatcgccacaaaaactactatgctctaagcggaatcgggtacgagagtctagacttgtgtttggaaggagtagggattcatcatcacgtacttgaaacaggaaacgctgtatatggaaaagttcaacatgattattctactatcaaagagaaggccaaagaaatgagtgcacttagtccaggacctatcatcgattaccacgtctggataggagattgtatctgtcaagttactgctgtggacgtacatggaaaggaaattatgaaaatgagattcaaaaagggtgcggtgcttccgatcccaaatctggtaaaagttaaacttggggagaatgatacagaaaatctttcttctactatatcggcggcaccatcgaggtaaccacctctctggaagacagcgtgaatcatgtactcatgaaacgtttggaaactatacgccatatgtggtctgttgtatatgatcattttgatattgtgaatggtaaagaatgctgttatgtgcatacgcattcatctaatcaaaatcctataccgagtactgtaaaaacaaatttgtacatgaagactatgggatcatgcattcaaatggattccatggaagctctagagtatcttagcgaactgaaggaatcaggtggatggagtcccagaccagaaatgcaggaatttgaatatccagatggagtggaagacactgaatcaattgagagattggcagaggagttcttcaatagatcagaacttcaggctggtgaatcagtcaaatttggtaattctattaattgttaaacatacatctgtttcagctaagcaactaagaacacgtatacggcagcagcttccttctatactctcatcttttaccaacacaaagggtggatatttgttcattggagttgataataatacacacaaagtatttggattcacggtgggttacgactacctcagactgatagagaatgatatagaaaagcatatcaaaagacttcgtgttgtgcatttctgtgagaagaaagaggacatcaagtacgcgtgtcgattcatcaaggtatataaacctggggatgagactacctcgacatacgtgtgcgctatcaaagtggaaagatgctgttgtgctgtgtttgcagattggccagaatcatggtatatggatactaatggtatcaagaagtattctccagatgaatgggtgtcacatataaaattttaattaatgtaactatagagaacaaataataaggttgtaatatcatatagacaataactaacaattaattagtaactgttatctcttttttaactaaccaactaactatatacctattaatacatcgtaattatagttcttaacatctattaatcattaattcgcttctttaattttttataaactaacattgttaattgaaaagggataacatgttacagaatataaattatatatggatttttttaaaaaggaaatacttgactggagtatatatttatctcttcattatatagcacgcgtgttttccaatttttccacatcccatataatacaggattataatctcgttcgaacatacgagaaagtggataaaacaatagttgattttttatctaggttgccaaatttattccatattttagaatatggggaaaatattctacatatttattctatggatgatgctaatacgaatattataattttttttctagatagagtattaaatattaataagaacgggtcatttatacacaatctcgggttatcatcatccattaatataaaagaatatgtatatcaattagttaataatgatcatccagataataggataagactaatgcttgaaaatggacgtagaacaagacattttttgtcctatatatcagatacagttaatatctatatatgtattttaataaatcatggattttatatagatgccgaagacagttacggttgtacattattacatagatgtatatatcactataagaaatcagaatcagaatcatacaatgaattaattaagatattgttaaataatggatcagatgtagataaaaaagatacgtacggaaacacaccttttatcctattatgtaaacacgatatcaacaacgtggaattgtttgagatatgtttagagaatgctaatatagactctgtagactttaatagatatacacctcttcattatgtctcatgtcgtaataaatatgattttgtaaagttattaatttctaaaggagcaaatgttaatgcgcgtaataaattcggaactactccattttattgtggaattatacacggtatctcgcttataaaactatatttggaatcagacacagagttagaaatagataatgaacatatagttcgtcatttaataatttttgatgctgttgaatctttagattatctattatccagaggagttattgatattaactatcgtactatatacaacgaaacatctatttacgacgctgtcagttataatgcgtataatacgttggtctatctattaaacaaaaatggtgattttgagacgattactactagtggatgtacatgtatttcggaagcagtcgcaaacaacaacaaaataataatggaagtactattgtctaaacgaccatctttgaaaattatgatacagtctatgatagcaattactaaacataaacagcataatgcagatttattgaaaatgtgtataaaatatactgcgtgtatgaccgattatgatactcttatagatgtacagtcgctacagcaatataaatggtatattttaagatgtttcgatgaaatagatatcatgaagagatgttatataaaaaataaaactgtattccaattagttttttgtatcaaagacattaatactttaatgagatacggtaaacatccttctttcgtgaaatgcactagtctcgacgtatacggaagtcgtgtacgtaatatcatagcatctattagatatcgtcagagattaattagtctattatccaagaagctggatcctggagataaatggtcgtgttttcctaacgaaataaaatataaaatattggaaaactttaacgataacgaactatccacatatctaaaaatcttataaacattattaaaatataaaatctaagtaggataaaatcacactacatcattgtttccttttagtgctcgacagtgtatactatttttaacgctcataaataaaaatgaaaacgatttccgttgttacgttgttatgcgtactacctgctgttgtttattcaacatgtactgtacccactatgaataacgctaaattaacgtctaccgaaacatcgtttaatgataaccagaaagttacgtttacatgtgatcagggatatcattctttggatccaaatgctgtctgtgaaacagataaatggaaatacgaaaatccatgcaaaaaaatgtgcacagtttctgattatgtctctgaactatataataaaccgctatacgaagtgaattccaccatgacactaagttgcaacggcgaaacaaaatattttcgttgcgaagaaaaaaatggaaatacttcttggaatgatactgttacgtgtcctaatgcggaatgtcaacctcttcaattagaacacggatcgtgtcaaccagttaaagaaaaatactcatttggggaatatatgactatcaactgtgatgttggatatgaggttattggtgcttcgtacataagttgtacagctaattcttggaatgttattccatcatgtcaacaaaaatgtgatatgccgtctctatctaacggattaatttccggatctacattttctatcggtggcgttatacatcttagttgtaaaagtggttttacactaacggggtctccatcatccacatgtatcgacggtaaatggaatcccatactcccaatatgtgtacgaactaacgaaaaatttgatccagtggatgatggtcccgacgatgagacagatttgagcaaactctcgaaagacgttgtacaatatgaacaagaaatagaatcgttagaagcaacttatcatataatcatagtggcgttgacaattatgggcgtcatatttttaatctccgttatagtattagtttgttcctgtgacaaaaataatgaccaatataagttccataaattgctaccgtaaatataaatccgttaaaataattaataatttaataacaaacaagtatcaaaagattaaagacttatagctagaatcaattgagatgtcttcttcagtggatgttgatatctacgatgccgttagagcatttttactcaggcactattataacaagagatttattgtgtatggaagaagtaacgccatattacataatatatacaggctatttacaagatgcgccgttataccgttcgatgatatagtacgtactatgccaaatgaatcacgtgttaaacaatgggtgatggatacacttaatggtataatgatgaatgaacgcgatgtttctgtaagcgttggcaccggaatactattcatggaaatgtttttcgattacaataaaaatagtatcaacaatcaactaatgtatgatataattaatagcgtatctataattctagctaatgagagatatagaagcgcttttaacgacgatggtatatacatccgtagaaatatgattaacaagttgtacggatacgcatctctaactactattggcacgatcgctggaggtgtttgttattatctgttgatgcatctagttagtttgtataaataattatttcaatatactagttaaaattttaagattttaaatgtataaaaaactaataacgtttttatttgtaataggtgcattagcatcctattcgaataatgagtacactccgtttaataaactgagtgtaaaactctatatagatggagtagataatatagaaaattcatatactgatgataataatgaattggtgttaaattttaaagagtacacaatttctattattacagagtcatgcgacgtcggatttgattccatagatatagatgttataaacgactataaaattattgatatgtataccattgactcgtctactattcaacgcagaggtcacacgtgtagaatatctaccaaattatcatgccattatgataagtacccttatattcacaaatatgatggtgatgagcgacaatattctattactgcagagggaaaatgctataaaggaataaaatatgaaataagtatgatcaacgatgatactctattgagaaaacatactcttaaaattggatctacttatatatttgatcgtcatggacatagtaatacatattattcaaaatatgatttttaaaaatttaaaatatattatcacttcagtgacagtagtcaaataacaaacaacaccatgagatatattataattctcgcagttttgttcattaatagtatacatgctaaaataactagttataagtttgaatccgtcaattttgattccaaaattgaatggactggggatggtctatacaatatatcccttaaaaattatggcatcaagacgtggcaaacaatgtatacaaatgtaccagaaggaacatacgacatatccgcatttccaaagaatgatttcgtatctttctgggttaaatttgaacaaggcgattataaagtggaagagtattgtacgggactatgcgtcgaagtaaaaattggaccaccgactgtaacattgactgaatacgacgaccatatcaatttgtacatcgagcatccgtatgctactagaggtagcaaaaagattcctatttacaaacgcggtgacatgtgtgatatctacttgttgtatacggctaacttcacattcggagattctaaagaaccagtaccatatgatatcgatgactacgattgcacgtctacaggttgcagcatagactttgtcacaacagaaaaagtgtgcgtgacagcacagggagccacagaagggtttctcgaaaaaattactccatggagttcgaaagtatgtctgacacctaaaaagagtgtatatacatgcgcaattagatccaaagaagatgttcccaatttcaaggacaaaatggccagagttatcaagagaaaatttaatacacagtctcaatcttatttaactaaatttctcggtagcacatcaaatgatgttaccacttttcttagcatgcttaacttgactaaatattcataactaatttttattaatgatacaaaaacgaaataaaactgcatattatacactggttaacgcccttataggctctaaccattttcaagatgaggtccctgattatagtccttctgttcccctctatcatctactccatgtctattagacgatgtgagaagactgaagaggaaacatggggattgaaaatagggttgtgtataattgccaaagatttctatcccgaaagaactgattgcagtgttcatctcccaactgcaagtgaaggattgataactgaaggcaatggattcagggatatacgaaacaccgataaattataaaaaaagcaatgtgtccgctgtttccgttaataatactattttcgtaactggcggattattcataaataactctaatagcacgatcgtggttaacaatatggaaaaacttgacatttataaagacaaacaatggtcgattatagaaatgcctatggctagggtatatcacggcattgactcgacatttggaatgttatattttgccggaggtctatccgttaccgaacaatatggtaatttagagaaaaacaacgagatatcttgttacaatcctagaacgaataagtggtttgatatttcatatactatttataagatatccatatcatcattgtgtaaactaaataacgtcttctatgtatttagtaaggacattggatatgtggaaaagtatgatggtgcatggaagttagtacatgatcgtctccccgctataaaggcattatcaacttctccttattgattgaaaatgaaaatataaatagtttttatgtatagcagtattaccctatagttttattgcttactactaacatggatacagatgttacaaatgtagaagatatcataaatgaaatagatagagagaaagaagaaatactaaaaaatgtagaaattgaaaataataaaaacattaacaagaatcatcccaatgaatatattagagaagcactcgttattaataccagtagtaatagtgattccattgataaagaagttatagaatgtatcagtcacgatgtaggaatatagatcatatctactaatttttataatcgatacaaaacataaaaaacaactcgttattacatagcaggcatggaatccttcaagtattgttttgataacgatggcaagaaatggattatcggaaatactttatattctggtaattcaatactctataaggtcagaaaaaatttcactagttcgttctacaattacgtaatgaagatagatcacaaatcacacaagccattgttgtctgaaatacgattctatatatctgtattggatcctttgactatcgacaactggacacgggaacgtggtataaagtatttggctattccagatctgtatggaattggagaaaccgatgattatatgttcttcgttataaagaattcgggaagagtattcgccccaaaggatactgaatcagtcttcgaagcatgcgtcactatgataaacacgttagagtttatacactctcgaggatttacccatggaaaaatagaaccgaggaatatactgattagaaataaacgtctttcactaattgactattctagaactaacaaactatacaagagtggaaactcacatatagattacaacgaggacatgataacttcaggaaatatcaattatatgtgtgtagacaatcatcttggagcaacagtttcaagacgaggagatttagaaatgttgggatattgcatgatagaatggttcggtggcaaacttccatggaaaaacgaaagtagtataaaagtaataaaacaaaaaaaagaatataaaaaatttatagctactttctttgaggactgttttcctgaaggaaatgaacctctggaattagttagatatatagaattagtatacacgttagattattctcaaactcctaattatgacagactacgtaaactgtttatacaagattgaaattatattcttttttttatagagtgtggtagtgttacggatatctaatattaatattagactatctctatcgcgctacacgaccaatatcgattactatggatatcttctatgaaaggagagaatgtatttatttctccagcgtcaatctcgtcagtattgacaatactgtattatggagctaatggatccactgctgaacagctatcaaaatatgtagaaacggaggagaacacggataaggttagcgctcagaatatctcattcaaatccatgaataaagtatatgggcgatattctgccgtgtttaaagattcctttttgagaaaaattggcgataagtttcaaactgttgacttcactgattgtcgcactatagatgcaatcaacaagtgtgtagatatctttactgaggggaaaatcaatccactattggatgaaccattgtctcctagcaattagtgccgtatactttaaagcaaaatggttgacgccattcgaaaaggaatttaccagtgattatcccttttacgtatctccgacggaaatggtagacgtaagtatgatgtctatgtacggcaaggcatttaatcacgcatctgtaaaagaatcattcggcaacttttcaatcatagaactgccatatgttggagatactagtatgatggtcattcttccagacaagattgatggattagaatccatagaacaaaatctaacagatacaaattttaagaaatggtgtgactttatggatgctatgtttatagatgttcacattcccaagtttaaggtaacaggctcgtataatctggtggatactctagtaaagtcaggactgacagaggtgttcggttcaactggagattatagcaatatgtgtaatttagatgtgagtgtcgacgctatgatccacaaaacgtatatagatgtcaatgaagagtatacagaagcagctgcagcaacttctgtactagtggcagactgtgcatcaacaattacaaatgagttctgtgcagatcatccgttcatctatgtgattaggcatgttgatggaaaaattcttttcgttggtagatattgctctccgacaactaattgttaaccattttttttaaaaaaaatagaaaaaacatgtggtattagtgcaggtcgttgttcttccaattgcaattggtaagatgacggccaactttagtacccacgtcttttcaccacagcactgtggatgtgacagactgaccagtattgatgacgtcaaacaatgtttgactgaatatatttattggtcgtcctatgcataccgcaacaggcaatgcgctggacaattgtattccacactcctctcttttagagatgatgcggaattagtgttcatcgacattcgcgagctggtaaaaaatatgccgtgggatgatgtcaaagattgtacagaaatcatccgttgttatataccggatgagcaaaaaaccatcagagagatttcggccatcatcggactttgtgcatatgctgctacttactggggaggtgaagaccatcccactagtaacagtctgaacgcattgtttgtgatgcttgagatgctaaattacgtggattataacatcatattccggcgtatgaattgatgagttgtacatcttgacattttctttcttctcttctccctttcttctcttctcccttcctccctcttctccctttcccagaaacaaacttttttacccactataaaataaaatgagtatactacctattatatttcttcctatatttttttattcttcattcgttcagacttttaacgcgtctgaatgtatcgacaaagggcaatattttgcatcattcatggagttagaaaacgagccagtaatcttaccatgtcctcaaataaatacgctatcatccggatataatatattagatattttatgggaaaaacgaggagcggataatgatagaattataccgatagataatggtagcaatatgctaattctgaacccgacacaatcagactctggtatttatatatgcattaccacgaacgaaacctactgtgacatgatgtcgttaaatttgacaatcgtgtctgtctcagaatcaaatatagatcttatctcgtatccacaaatagtaaatgagagatctactggcgaaatggtatgtcccaatattaatgcatttattgctagtaacgtaaacgcagatattatatggagcggacatcgacgccttagaaataagagacttaaacaacggacacctggaattattaccatagaagatgttagaaaaaatgatgctggttattatacatgtgttttagaatatatatacggtggcaaaacatataacgtaaccagaattgtaaaattagaggtacgggatagaataataccttctactatgcaattaccagatggcattgtaacttcaataggtagtaatttgactattgcatgcagagtatcgttgagacctcccacaacggacaccgacgtcttttggataagtaatggtatgtattacgaagaagatgatggggacggaaacggtagaataagtgtagcaaataaaatctatatgaccgataagagacgtgttattacatcccggttaaacattaatcctgtcaaggaagaagatgctacaacgtttacgtgtatggcgtttactattcctagcatcagcaaaacagttactgttagtataacgtgaatgtatgttgttacatttccatgtcaattgagtttataagaatttttatacattatcttccaacaaacaattgacgaacgtattgctatgattaactcccacgatactatgcatattattaatcattaacttgcagactatacctagtgctattttgacatactcgtgttcttgtgtaattgcggtatctatattattaaagtacgtaaatctagctatagttttattatttaattttagataatataccgtctccttatttttaaaaattgccacatcctttattaaatcatgaatgggaatttctatgtcatcgttagtatattgtgaacaacaagagcagatatctataggaaagggtggaatgcgatacattgatctatgtagttttaaaacacacgcgaactttgaagaatttatataaatcattccatcgatacatccttctatgttgacatgtatatatccaggaattcttttattaatgtcaggaaatgtataaactaaaacattgcccgaaagcggtgcctctatctgcgttatatccgttcttaacttacaaaatgtaaccaatacctttgcatgacttgttttgttcggcaacgttagtttaaacttgacgaatggattaattacaatagcatgatccgcgcatctattaagtttttttactttaacgcccttgtatgtttttacagagactttatctaaatttctagtgcttgtatgtgttataaatataacgggatatagaaccgaatcacctaccttagatacccaattacattttatcagatccagataataaacaaattttgtcgccctaactaattctatattgttatatattttacaattggttatgatatcatgtaataacttggagtctaacgcgcatcgtcgtacgtttatacaattgtgatttagtgtagtatatctacacatgtatttttccgcactatagtattctggactagtgataaaactatcgttatatctgtcttcaatgaactcatcgagatattgctctctgtcatattcatacacctgcataaactttctagacatcttacaatccgtgttattttaggatcatatttacatatttacgggtatatcaaagatgttagattagttaatgggaatcgtctataataatgaatattaaacaattatatgaggacttttaccacaaagcatcataaaaatgagtcgtcgtctgatttatgttttaaatatcaaccgcaaatcaactcataaaatacaagagaatgaaatatatacatattttagtcattgcaatatagaccatacttctacagaacttgattttgtagttaaaaactatgatctaaacagacgacaacctgtaactgggtatactgcactacactgctatttgtataataattactttacaaacgatgtactgaagatattattaaatcatgacgtaaatgtaacgatgaaaaccagtagcggacgtatgcctgtttatatattgcttactagatgttgtaatatttcacatgatgtagtgatagatatgatagacaaagataaaaaccacttattacatagagactattccaacctattactagagtatataaaatctcgttacatgttattgaaggaagaggatatcgatgagaacatagtatccactttattagataagggaatcgatcctaactttaaacaagacggatatacagcgttacattattattatttgtgtctcgcacacgtttataaactaggtgagtgtagaaaaccgataacgataaaaaaggccaagcgaattatttctttgtttatacaacatggagctaatctaaacgcgttagataattgtggtaatacaccattccatttgtatcttagtattgaaatgtgtaataatattcatatgactaaaatgctgttgacttttaatccgaatttcaaaatatgtaataatcatggattaacgcctatactatgttatataacttccgactacatacaacacgatattcttgttatgttaatacatcactatgaaacaaatgttggagaaatgccgatagatgagcgtcgtatgatcgtattcgagtttatcaaaacatattctacacgtccggcagattcgataacttatttgatgaataggtttaaaaatataaatatttatacccgctatgaaggaaagacattattacacgtagcatgtgaatataataatacacaagtaatagattatcttatacgtatcaacggagatataaatgcgttaaccgacaataacaaacacgctacacaactcattatagataacaaagaaaattccccatataccattaattgtttactgtatatacttagatatattgtagataagaatgtgataagatcgttggtggatcaacttccatctctacctatcttcgatataaaatcatttgagaaattcatatcctactgtatacttttagatgacacattttacgataggcacgttaagaatcgcgattctaaaacgtatcgatacgcattttcaaaatacatgtcgtttgataaatacgatggtataataactaaatgtcacgacgaaacaatgttactcaaactgtccactgttctagacactacactatatgcagttttaagatgtcataattcgagaaagttaagaagatacctcaacgagttaaaaaaatataataacgataagtcctttaaaatatattctaatattatgaatgagagataccttaatgtatattataaagatatgtacgtgtcaaaggtatatgataaactatttcctgttttcacagataaaaattgtctactaacattactaccttcagaaattatatacgaaatattatacatgctgacaattaacgatctttataatatatcgtatccacctaccaaagtatagttgtatttttctcatgcgatgtgtgtaaaaaaactgatattatataaatattttagtgccgtataataaagatgacgatgaaaatgatggtacatatatatttcgtatcattattgttattgctattccacagttacgccatagacatcgaaaatgaaatcacagaattcttcaataaaatgagagatactctaccagctaaagactctaaatggttgaatccagcatgtatgttcggaggcacaatgaatgatatagccgctctaggagagccattcagcgcaaagtgtcctcctattgaagacagtcttttatcgcacagatataaagactatgtggttaaatgggagaggctagaaaagaatagacggcgacaggtttctaataaacgtgttaaacatggtgatttatggatagccaactatacatctaaattcagtaaccgtaggtatttgtgcaccgtaactacaaagaatggtgactgtgttcagggtatagttagatctcatattaaaaaacctccttcatgcattccaaaaacatatgaactaggtactcatgataagtatggcatagacttatactgtggaattctttacgcaaaacattataataatataacttggtataaagataataaggaaattaatatcgacgacattaagtattcacaaacgggaaaggaattaattattcataatccagagttagaagatagcggaagatacgactgttacgttcattacgacgacgttagaatcaagaatgatatcgtagtatcaagatgtaaaatacttacggttataccgtcacaagaccacaggtttaaactaatactagatccgaaaatcaacgtaacgataggagaacctgccaatataacatgcactgctgtgtcaacgtcattattgatcgacgatgtactgattgaatgggaaaatccatccggatggcttataggattcgattttgatgtatactctgttttaactagtagaggcggtatcaccgaggcgaccttgtactttgaaaatgttactgaagaatatataggtaatacatataaatgtcgtggacacaactattattttgaaaaaacccttacaactacagtagtattggagtaaatatacaatgcatttttatatacattactgaattattattactgaattattattactgaattattattaattatatcgtatttgtgctatagaatggatgaagatacgcgactatctaggtatttgtatctcaccgatagagaacatataaatgtagactctattaaacagttgtgtaaaatatcagatcctaatgcatgttatagatgtggatgtacggctttacatgagtacttttataattatagatcagtcaacggaaaatacaagtatagatacaacggttactatcaatattattcatctagcgattatgaaaattataatgaatattattatgatagaactggtatgaacagtgagagtgataatatatcaatcaaaacagaatatgaattctatgatgaaacacaagatcaaagtacacaactagtaggttacgacattaaactcaaaaccaatgaggatgattttatggctatgatagatcagtgggtgtccatgattatatagatgaatcaattaataaagtagtatatggaagagagtctcacgtaagatggcgggatatatggcaagaacataatgatggcgtatacagtataggaaaggagtgcatagataatatatacgaagacaaccataccgtagacgaattctacaagatagacagcgtatcagatgtagatgacgcggaacacatatctccgataactaaaaaaccatagaatcagttgatgataatacctacatttctaatcttccgtataccatcaaatacaaaatattcgagcaacaataagtattttttatacctttaaaactgataaataaattttttctagtgatattttggcaagatgagaatcctatttctcatcgctttcatgtatgggtgtgttcactcatatgttaacgcggttgaaaccaaatgtccaaatctagacattgtaacatcttctggagaatttcattgttcaggatgtgtggaacatatgcctgagtttagctatatgtattggttggcaaaggatatgaaatcggacgaggataccaagtttatagaacatctgggtgatggcatcaaagaagatgaaaccgttcgtaccacagatagtggaatcgtcactctacgtaaagtccttcatgtgactgatactaataaatttgataattataggttcacttgtgtcctcgctacgctagatggcatttataaaaagaatgtttgctgaagtagttgtgtgctactatttttatttatgatataatctaatggaattaatttgaattgatatttatccaatactaaagattatattagaatcaaattaatcttttatacgagaaaaaataacgacatacgtcgtcaacaaattaaactttttatttattagttaactagcttatagaacttgctcattgttatgtttctaaaacgggtacggcatataggacaattatccgacgcaccggtttctcttcgtgttctatgccatatattgatgcatgttatgcaaaatatatgagtacacgaatccaataaaccaaagtatctatcgttttgagtaaacaacttcatagcaaattccacattctttttctttacttactctatacacgtcctcgtatttatttagtattttgatgatatccaactcagaaatggttgttgtattattgggtgtatttggagtataggtattattagctatgtaccaatttaccaaccctcttaatattgattgataatcacatcggttatccaattaataactaaattgtagtgtatatatagaccatatatgtttctatttttttgacagttacgtatagtttcagtaagttttgattgttgtattcctgtatctctagataagttagtcatatagtcccttccggcgatacgttttttccaagcccgaaattgattagccaaatgtgtatttatttttgtgatattgatataatatttcggataatgcatactgttagtcttatatcatttggttcatctatgtattgtaatattgttacatgatctatagatgatgtattgattttggcaggatcgaattccatatccgcgactaaacagtgaaaaaaatgtaaatactttttaaattttaaattagtaaaacttttttttattttttatgattccaaaaatactgaatacaaagtcctaaattataaatatggagatcatactaccacaacttattattatgtatacaaggccggtgtaatagatagatatatataattctattacaccggcagacaattaccgaccggtatttgtcgttaccaacataccgtataatatgtaatatacaattccataacccattgacagttgttatacatcaaaattgcaattcttttgattacgatgttataagaatgtagttaattgatgtatgatgttaatgtgtcctctttcctcttataacatcgtaatcaaaaacttttttataatatatacctaataatgtgtcttaatagttctcgtgattcgtcaaacaatcattcttataaaatataataaagcaacgtaaaaacacataaaaataagcgtaactaataagacaatggatatttacgacgataaaggtctacagactattaaactgtttaataatgaatttgattgtataaggaatgacatcagagaattatttaaacatgtaactgattccgatagtatacaacttccgatggaagacaattctgatattatagaaaatatcagaaaaatactatatagacgattaaaaaatgtagaatgtgttgacatcgataacacaataacttttatgaaatacgatccaaatgatgataataagcgtacgtgttctaattgggtacccttaactaataactatatggaatattgtctagtaatatatttggaaacaccgatatgtggaggcaaaataaaattataccaccctacaggaaatataaagtcggataaggatattatgtttgcaaagactctagactttaaatcaacgaaagtgttaactggacgtaaaacaattgccgttctagacatatccgtttcatataatagatcaatgactactattcactacaacgacgacgttgatatagatatacatactgataaaaatggaaaagagttatgttattgttatataacaatagatgatcattacttggttgatgtggaaactataggagttatagtcaatagatctggaaaatgtctgttagtaaataaccatctaggtataggtatcgttaaagataaacgtataagcgatagttttggagatgtatgtatggatacaatatttgacttttctgaagcacgagagttattttcattaactaatgatgataacaggaatatagcatgggacactgataaactagacgatgatacagatatatggactcccgtcacagaagatgattacaaatttctttctagactagtattgtatgcaaaatctcaatcggatactgtatttgactattatgttcttactggtgatacggaaccacccactgtattcattttcaaggtaactagattttactttaatatgccgaaataaaaaatttttgtataatatctagaggtagaggtattgtttagataaatacaaataacatagatacatcgcatacttagcatttttataaatatacataagacatacactttatacatttttgtaaaaatactcataaaaaaatttataaaaattatggcacaaccatatcttgtataggtagtttagttcgtcgagtgaacctataaacagataatagacaacacataataatgcctactaatacaagcataataccgggagatgggatatatgacgttgtagtgtttgggttttctgaacgttgatagtctactaatactacatgctgacatctaatgcctgtataaccatgagagcatctacaatacataccgtcaatatctctagcgtggatacagtcaccgtgtaaacaatatccatctccctctggaccgcataatctgatagctggaatatctgttgtagcgtttgtaatttctggcaatgtcgtttcgatagcgttaccactatcggcgaatgatctgattatcatagcagcgaacaacaacatcagataatttatcaacatttttgatggattctgtgtttatgctgtttctcagtgtgtgtttatgacaagattgggaattttatattattaattcagtaatataaactaataatatattgttaattgtgtaaataatataaaaataacaatacaatattgaatgtgttgctgttaaaaatgtatgtgttaatataatagaataaaataaatgagtatgatcattttagataacgattgattttatcattaccgcttcattcttatattctttgcttacggaacctatatttagaaacatctactaacaattttttatgcttgcattattaatggtatgtaatatgattgattgtgtacgcaataccaatttgttaagtatgaatacggggtacaaacataaattgaaatttaacattatttatttatgatatatatcgttatcgttaggtctataccatggatatctttaaagaactaatcttaaaacaccctgatgaaaatgttttgatttctccagtttccattttatctactttatctattctaaatcatggagcagctggttctacagctgaacaactatcaaaatatatagagaatatgaatgagaatacacccgatgacaataatgatgacatggaggtagatattccgtattgtgcgacactagctaccgcaaataaaatatacggtagcgatagtatcgagttccacgcctccttcctacaaaaaataaaagacgattttcaaactgtaaactttaataatgctaaccaaacaaaggaactaatcaacgaatgggttaagacaatgacaaatggtaaaattaattccttattgactagtccgctatccattaatactcgtatgacagttgttagcgccgtccattttaaagcaatgtggaaatatccattttctaaacatcttacatatacagacaagttttatatttctaagaatatagttaccagcgttgatatgatggtgggtaccgagaataacttgcaatatgtacatattaatgaattattcggaggattctctattatcgatattccatacgagggaaactctagtatggtaattatactaccggacgacatagaaggtatatataacatagaaaaaaatataacagatgaaaaatttaaaaaatggtgtggtatgttatctactaaaagtatagacttgtatatgccaaagtttaaagtggaaatgacagaaccgtataatctggtaccgattttagaaaatttaggacttactaatatattcggatattatgcagattttagcaagatgtgtaatgaaactatcactgtagaaaaatttctacatacgacgtttatagatgttaatgaggagtatacagaagcatcggccgttacaggagtatttacgattaacttttcgatggtatatcgtacgaaggtctacataaaccatccattcatgtacatgattaaagacaccacaggacgtatactttttatagggaaatactgctatccgcaataaatataaacaaatagacttttataaagagtcttcaacgataagtatatcgacatactacttatgctgcgaaagattctgaacgagaacgactatctcaccctcttggatcatatccgcactgctaaatactaaatctccactacactttttatcatcttatgaggaatgattgccttcgtgaaataggaataattagcaccagaatagctatggattattgtggtagagagtgcactattctatgtcgtctactggatgaagatgtgacgtacaaaaaaataaaactagaaattgaaacgtgtcacaacttatcaaaacatatagatagacgaggaaacaatgcgctacattgttacgtctccaataaatgcgatacagacattaagattgttctctcgcggagtcgagagactttgtagaaacaacgaaggattaactccgctaggagtatacagtaagcatagatacgtaaaatctcagattgtgcatctactgatatccagctattcaaattcctctaacgaactcaagtcgaatataaatgatttcgatctgtattcggataatatcgacttacgtctgctaaaatacctaattgtggataaacggatacgtccgtccaagaatacgaattatgcaatcaatggtctcggattggtggatatatacgtaacgacgcctaatccgagaccagaagtattgctatggcttcttaaatcagaatgttacagcaccggttacgtatttcgtacctgtatgtacgacagtgatatgtgtaagaactctcttcattactatatatcgtctcatagagaatctcaatctctatccaaggatgtaattaaatgtttgatcgataacaatgtttccatccatggcagagacgaaggaggatctttacccatccaatactactggtctttctcaaccatagatatagagattgttaaattattattaataaaggatgtggacacgtgtagagtatacgacgtcagccctatattagaggcgtattatctaaacaagcgatttagagtaaccccatataatgtagacatggaaatcgttaatcttcttattgagagacgtcatactcttgtcgacgtaatgcgtagtattacttcgtacgattccagagaatataaccactacatcatcgataacattctaaagagatttagacaacaggatgaatccatcgtacaagccatactgataaactacttacattacggcgatatggtcgttcgatgcatgttagataacggacaacaactatcctctacacgactactttgttaataataatctcgtcgatgtaaacgtcgtaaggtttatcgtggaaaatatggacacgcggctgtaaatcacgtatcgaacaatggccgtctatgtatgtacggtctgatattatcgagatttaataattgcgggtatcactgttatgaaaccatactgatagatgtatttgatatactaagcaagtacatggatgatatagatatgatcgataactctactatattacgcggtcgatgtcaataatatacaatttgcaaagcggttattggaatatggagcgagtatcacgctcgataatcaatacggccatccagaaaagcagttacagaagagaaaacaaaacgaaatcgttgttctacaagatgtctctccctacgacgattactacgtaaaaaagatactagcctactgcctattaagggacgagtcattcgcggaactacatagtaaattctgtttaaacgaggactataaaagtgtatttatgaaaaatatatcattcgataagatagattccatcatcgtgacataagtcgcctcaaagagattcgaatctccgacaccgacctgtatacggtatcacagctatcttaaagccatacattcagacagtcacatttcatttcccatgtacgacgatctcatagaacagtgccatctatcgatggagcgtaaaagtaaactcgtcgacaaagcactcaataaattagagtctaccatcggtcaatctagactatcgtatttgcctccggaaattatgcgcaatatcatctaaacagtatgttgtacggaaagaaccattacaaatattatccatgatagaaagaaaatatctatatgattggagaagtaggaaacaggaacaagacaacgattactacattattaaatcatgaagtccgtattatactcgtatatattgtttctctcatgtataataataaacggaagagatatagcaccgcatgcaccatccgatggaaagtgtaaagacaacgaatacaaacgccataatttgtgtccgggaacatacgcttccagattatgcgatagcaagactaacacacgatgtacgccgtgtggttcgggtaccttcacatctcgcaataatcatttacccgcttgtctaagttgtaacggaagacgcgatcgtgtaacacgactcacaatagaatctgtgaatgctctcccggatattattgtcttctcaaaggatcatccggatgcaaggcatgtgtttcccaaacaaaatgtggaataggatacggagtatccggagacgtcatctgttctccgtgtggtctcggaacatattctcacaccgtctcttccgcagataaatgcgaacccgtacccagaaatacgtttaactatatcgatgtggaaattaacctgtatccagttaacgacacgtcgtgtactcggacgaccactaccggtctcagcgaatccatctcaacgtcggaactaactattactatgaatcataaagactgtaatcccgtatttcgtgatggatacttctccgttcttaataaggtagcgacttcaggtttctttacaggagaaaggtgtgcactctgaatttcgagattaaatgcaataacaaagattcttcctccaaacagttaacgaaagcaaagaatgatactatcatgccgcattcggagacagtaactctagtgggcgacatctatatactatatagtaataccaatactcaagactacgaaactgatacaatctcttatcatgtgggtaatgttctcgatgtcgatagccatatgcccggtagttgcgatatacataaactgatcactaattccaaacccacccactttttatagtaagtttttcacccataaataataaatacaataattaatttctcgtaaaagtagaaaatatattctaatttattgcacggtaaggaagtagaatcataaagaacagtactcaatcaatagcaattatgaaacaatatatcgtcctggcatgcatgtgcctggcggcagctgctatgcctgccagtcttcagcaatcatcctcatcctcctcctcgtgtacggaagaagaaaacaaacatcatatgggaatcgatgttattatcaaagtcacaaagcaagaccaaacaccgaccaatgataagatttgccaatccgtaacggaaattacagagtccgagtcagatccagatcccgaggtggaatcagaagatgattccacatcagtcgaggatgtagatcctcctaccacttattactccatcatcggtggaggtctgagaatgaactttggattcaccaaatgtcctcagattaaatccatctcagaatccgctgatggaaacacagtgaatgctagattgtccagcgtgtccccaggacaaggtaaggactctcccgcgatcactcatgaagaagctcttgctatgatcaaagactgtgaagtgtctatcgacatcagatgtagcgaagaagagaaagacagcgacatcaagacccatccagtactcgggtctaacatctctcataagaaagtgagttacgaagatatcatcggttcaacgatcgtcgatacaaaatgcgtcaagaatctagagtttagcgttcgtatcggagacatgtgcaaggaatcatctgaacttgaggtcaaggatggattcaagtatgtcgacggatcggcatctgaaggtgcaaccgatgatacttcactcatcgattcaacaaaactcaaagcgtgtgtctgaatcgataactctattcatctgaaattggatgagtagggttaatcgaacgattcaggcacaccacgaattaaaaaagtgtaccggacactatattccggtttgcaaaacaaaaatgttcttaactacattcacaaaaagttacctctcgcgacttcttctttttctgtctcaatagtgtgatacgattatgacactattcctattcctattcctatttcctttcagagtatcacaaaaatattaaacctctttctgatggtctcataaaaaaagttttacaaaaatatttttattctctttctctctttgatggtctcataaaaaaagttttacaaaaatatttttattctctttctctctttgatggtctcataaaaaaagttttacaaaaatatttttattctctttctctctttgatggtctcataaaaaaagttttacaaaaatatttttattctctttctctctttgatggtctcataaaaaaagttttacaaaaatatttttattctctttctctctttgatggtctcataaaaaaagttttacaaaaatatttttattctctttctctctttgatggtctcataaaaaaagttttacaaaaatatttttattctctttctctctttgatggtctcataaaaaaagttttacaaaaatatttttattctctttctctctttgatggtctcataaaaaaagttttacaaaaatatttttattctctttctctctttgatggtctcataaaaaaagttttacaaaaatatttttattctctttctctctttgatggtctcataaaaaaagttttacaaaaatatttttattctctttctctctttgatggtctcataaaaaaagttttacaaaaatatttttattctctttctctctttgatggtctcataaaaaagttttacaaaaatatttttattctctttctctctttgatggtctcataaaaaagttttacaaaaatatttttattctctttctctctttgatggtctcataaaaaaagttttacaaaaatatttttattctctttctctctttgatggtctcataa

SEQ ID NO: 5 - DNA, 201444 bp, Artificial Sequence
  GLV-1h190 genome
ttatgagaccatcaaagagagaaagagaataaaaatatttttgtaaaactttttttatgagaccatcaaagagagaaagagaataaaaatatttttgtaaaacttttttatgagaccatcaaagagagaaagagaataaaaatatttttgtaaaacttttttatgagaccatcaaagagagaaagagaataaaaatatttttgtaaaactttttttatgagaccatcaaagagagaaagagaataaaaatatttttgtaaaactttttttatgagaccatcaaagagagaaagagaataaaaatatttttgtaaaactttttttatgagaccatcaaagagagaaagagaataaaaatatttttgtaaaactttttttatgagaccatcaaagagagaaagagaataaaaatatttttgtaaaactttttttatgagaccatcaaagagagaaagagaataaaaatatttttgtaaaactttttttatgagaccatcaaagagagaaagagaataaaaatatttttgtaaaactttttttatgagaccatcaaagagagaaagagaataaaaatatttttgtaaaactttttttatgagaccatcaaagagagaaagagaataaaaatatttttgtaaaactttttttatgagaccatcaaagagagaaagagaataaaaatatttttgtaaaactttttttatgagaccatcaaagagagaaagagaataaaaatatttttgtaaaactttttttatgagaccatcaaagagagaaagagaataaaaatatttttgtaaaactttttttatgagaccatcagaaagaggtttaatatttttgtgatactctgaaaggaaataggaataggaataggaatagtgtcataatcgtatcacactattgagacagaaaaagaagaagtcgcgagaggtaactttttgtgaatgtagttaagaacatttttgttttgcaaaccggaatatagtgtccggtacacttttttaattcgtggtgtgcctgaatcgttcgattaaccctactcatccaatttcagatgaatagagttatcgattcagacacacgctttgagttttgttgaatcgatgagtgaagtatcatcggttgcaccttcagatgccgatccgtcgacatacttgaatccatccttgacctcaagttcagatgattccttgcacatgtctccgatacgaacgctaaactctagattcttgacgcattttgtatcgacgatcgttgaaccgatgatatcttcgtaactcactttcttatgagagatgttagacccgagtactggatgggtcttgatgtcgctgtctttctcttcttcgctacatctgatgtcgatagacacttcacagtctttgatcatagcaagagcttcttcatgagtgatcgcgggagagtccttaccttgtcctggggacacgctggacaatctagcattcactgtgtttccatcagcggattctgagatggatttaatctgaggacatttggtgaatccaaagttcattctcagacctccaccgatgatggagtaataagtggtaggaggatctacatcctcgactgatgtggaatcatcttctgattccacctcgggatctggatctgactcggactctgtaatttccgttacggattggcaaatcttatcattggtcggtgtttggtcttgctttgtgactttgataataacatcgattcccatatgatgtttgttttcttcttccgtacacgaggaggaggatgaggatgattgctgaagactggcaggcatagcagctgccgccaggcacatgcatgccaggacgatatattgtttcataattgctattgattgagtactgttctttatgattctacttccttaccgtgcaataaattagaatatattttctacttttacgagaaattaattattgtatttattatttatgggtgaaaaacttactataaaaagtgggtgggtttggaattagtgatcagtttatgtatatcgcaactaccgggcatatggctatcgacatcgagaacattacccacatgataagagattgtatcagtttcgtagtcttgagtattggtattactatatagtatatagatgtcgcccactagagttactgtctccgaatgcggcatgatagtatcattctttgctttcgttaactgtttggaggaagaatctttgttattgcatttaatctcgaaattcagagtgcacacctttctcctgtaaagaaacctgaagtcgctaccttattaagaacggagaagtatccatcacgaaatacgggattacagtctttatgattcatagtaatagttagttccgacgttgagatggattcgctgagaccggtagtggtcgtccgagtacacgacgtgtcgttaactggatacaggttaatttccacatcgatatagttaaacgtatttctgggtacgggttcgcatttatctgcggaagagacggtgtgagaatatgttccgagaccacacggagaacagatgacgtctccggatactccgtatcctattccacattttgtttgggaaacacatgccttgcatccggatgatcctttgagaagacaataatatccgggagagcattcacagattctattgtgagtcgtgttacacgatcgcgtcttccgttacaacttagacaagcgggtaaatgattattgcgagatgtgaaggtacccgaaccacacggcgtacatcgtgtgttagtcttgctatcgcataatctggaagcgtatgttcccggacacaaattatggcgtttgtattcgttgtctttacactttccatcggatggtgcatgcggtgctatatctcttccgtttattattatacatgagagaaacaatatatacgagtataatacggacttcatgatttaataatgtagtaatcgttgtcttgttcctgtttcctacttctccaatcatatagatattttctttctatcatggataatatttgtaatggttctttccgtacaacatactgtttagatgatattgcgcataatttccggaggcaaatacgatagtctagattgaccgatggtagactctaatttattgagtgctttgtcgacgagtttacttttacgctccatcgatagatggcactgttctatgagatcgtcgtacatgggaaatgaaatgtgactgtctgaatgtatggctttaagatagctgtgataccgtatacaggtcggtgtcggagattcgaatctctttgaggcgacttatgtcacgatgatggaatctatcttatcgaatgatatatttttcataaatacacttttatagtcctcgtttaaacagaatttactatgtagttccgcgaatgactcgtcccttaataggcagtaggctagtatcttttttacgtagtaatcgtcgtagggagagacatcttgtagaacaacgatttcgttttgttttctcttctgtaactgcttttctggatggccgtattgattatcgagcgtgatactcgctccatattccaataaccgctttgcaaattgtatattattgacatcgaccgcgtaatatagtagagttatcgatcatatctatatcatccatgtacttgcttagtatatcaaatacatctatcagtatggtttcataacagtgatacccgcaattattaaatctcgataatatcagaccgtacatacatagacggccattgttcgatacgtgatttacagccgcgtgtccatattttccacgataaaccttacgacgtttacatcgacgagattattattaacaaagtagtcgtgtagaggatagttgttgtccgttatctaacatgcatcgaacgaccatatcgccgtaatgtaagtagtttatcagtatggcttgtacgatggattcatcctgttgtctaaatctctttagaatgttatcgatgatgtagtggttatattctctggaatcgtacgaagtaatactacgcattacgtcgacaagagtatgacgtctctcaataagaagattaacgatttccatgtctacattatatggggttactctaaatcgcttgtttagataatacgcctctaatatagggctgacgtcgtatactctacacgtgtccacatcctttattaataataatttaacaatctctatatctatggttgagaaagaccagtagtattggatgggtaaagatcctccttcgtctctgccatggatggaaacattgttatcgatcaaacatttaattacatccttggatagagattgagattctctatgagacgatatatagtaatgaagagagttcttacacatatcactgtcgtacatacaggtacgaaatacgtaaccggtgctgtaacattctgatttaagaagccatagcaatacttctggtctcggattaggcgtcgttacgtatatatccaccaatccgagaccattgattgcataattcgtattcttggacggacgtatccgtttatccacaattaggtattttagcagacgtaagtcgatattatccgaatacagatcgaaatcatttatattcgacttgagttcgttagaggaatttgaatagctggatatcagtagatgcacaatctgagattttacgtatctatgcttactgtatactcctagcggagttaatccttcgttgtttctacaaagtctctcgactccgcgagagaacaatcttaatgtctgtatcgcatttattggagacgtaacaatgtagcgcattgtttcctcgtctatctatatgttttgataagttgtgacacgtttcaatttctagttttatttttttgtacgtcacatcttcatccagtagacgacatagaatagtgcactctctaccacaataatccatagctattctggtgctaattattcctatttcacgaaggcaatcattcctcataagatgataaaaagtgtagtggagatttagtatttagcagtgcggatatgatccaagagggtgagatagtcgttctcgttcagaatctttcgcagcataagtagtatgtcgatatacttatcgttgaagactctttataaaagtctatttgtttatatttattgcggatagcagtatttccctataaaaagtatacgtcctgtggtgtctttaatcatgtacatgaatggatggtttatgtagaccttcgtacgatataccatcgaaaagttaatcgtaaatactcctgtaacggccgatgcttctgtatactcctcattaacatctataaacgtcgtatgtagaaatttttctacagtgatagtttcattacacatcttgctaaaatctgcataatatccgaatatattagtaagtcctaaattttctaaaatcggtaccagattatacggttctgtcatttccactttaaactttggcatatacaagtctatacttttagtagataacataccacaccattttttaaatttttcatctgttatatttttttctatgttatatataccttctatgtcgtccggtagtataattaccatactagagtttccctcgtatggaatatcgataatagagaatcctccgaataattcattaatatgtacatattgcaagttattctcggtacccaccatcatatcaacgctggtaactatattcttagaaatataaaacttgtctgtatatgtaagatgtttagaaaatggatatttccacattgctttaaaatggacggcgctaacaactgtcatacgagtattaatggatagcggactagtcaataaggaattaattttaccatttgtcattgtcttaacccattcgttgattagttcctttgtttggttagcattattaaagtttacagtttgaaaatcgtcttttattttttgtaggaaggaggcgtggaactcgatactatcgctaccgtatattttatttgcggtagctagtgtcgcacaatacggaatatctacctccatgtcatcattattgtcatcgggtgtattctcattcatattctctatatattttgatagttgttcagctgtagaaccagctgctccatgatttagaatagataaagtagataaaatggaaactggagaaatcaaaacattttcatcagggtgttttaagattagttctttaaagatatccatggtatagacctaacgataacgatatatatcataaataaataatgttaaatttcaatttatgtttgtaccccgtattcatacttaacaaattggtattgcgtacacaatcaatcatattacataccattaataatgcaagcataaaaaattgttagtagatgtttctaaatataggttccgtaagcaaagaatataagaatgaagcggtaatgataaaatcaatcgttatctaaaatgatcatactcatttattttattctattatattaacacatacatttttaacagcaacacattcaatattgtattgttatttttatattatttacacaattaacaatatattattagtttatattactgaattaataatataaaattcccaatcttgtcataaacacacactgagaaacagcataaacacagaatccatcaaaaatgttgataaattatctgatgttgttgttcgctgctatgataatcagatcattcgccgatagtggtaacgctatcgaaacgacattgccagaaattacaaacgctacaacagatattccagctatcagattatgcggtccagagggagatggatattgtttacacggtgactgtatccacgctagagatattgacggtatgtattgtagatgctctcatggttatacaggcattagatgtcagcatgtagtattagtagactatcaacgttcagaaaacccaaacactacaacgtcatatatcccatctcccggtattatgcttgtattagtaggcattattatgtgttgtctattatctgtttataggttcactcgacgaactaaactacctatacaagatatggttgtgccataatttttataaatttttttatgagtatttttacaaaaatgtataaagtgtatgtcttatgtatatttataaaaatgctaagtatgcgatgtatctatgttatttgtatttatctaaacaatacctctacctctagatattatacaaaaattttttatttcggcatattaaagtaaaatctagttaccttgaaaatgaatacagtgggtggttccgtatcaccagtaagaacataatagtcaaatacagtatccgattgagattttgcatacaatactagtctagaaagaaatttgtaatcatcttctgtgacgggagtccatatatctgtatcatcgtctagtttatcagtgtcccatgctatattcctgttatcatcattagttaatgaaaataactctcgtgcttcagaaaagtcaaatattgtatccatacatacatctccaaaactatcgcttatacgtttatctttaacgatacctatacctagatggttatttactaacagacattttccagatctattgactataactcctatagtttccacatcaaccaagtaatgatcatctattgttatataacaataacataactcttttccatttttatcagtatgtatatctatatcaacgtcgtcgttgtagtgaatagtagtcattgatctattatatgaaacggatatgtctagaacggcaattgttttacgtccagttaacactttcgttgatttaaagtctagagtctttgcaaacataatatccttatccgactttatatttcctgtagggtggtataattttattttgcctccacatatcggtgtttccaaatatattactagacaatattccatatagttattagttaagggtacccaattagaacacgtacgcttattatcatcatttggatcgtatttcataaaagttattgtgttatcgatgtcaacacattctacattttttaatcgtctatatagtatttttctgatattttctataatatcagaattgtcttccatcggaagttgtatactatcggaatcagttacatgtttaaataattctctgatgtcattccttatacaatcaaattcattattaaacagtttaatagtctgtagacctttatcgtcgtaaatatccattgtcttattagttacgcttatttttatgtgtttttacgttgctttattatattttataagaatgattgtttgacgaatcacgagaactattaagacacattattaggtatatattataaaaaagtttttgattacgatgttataagaggaaagaggacacattaacatcatacatcaattaactacattcttataacatcgtaatcaaaagaattgcaattttgatgtataacaactgtcaatgggttatggaattgtatattacatattatacggtatgttggtaacgacaaataccggtcggtaattgtctgccggtgtaatagaattatatatatctatctattacaccggccttgtatacataataataagttgtggtagtatgatctccatatttataatttaggactttgtattcagtatttttggaatcataaaaaataaaaaaaagttttactaatttaaaatttaaaaagtatttacatttttttcactgtttagtcgcggatatggaattcgatcctgccaaaatcaatacatcatctatagatcatgtaacaatattacaatacatagatgaaccaaatgatataagactaacagtatgcattatccgaaatattatatcaatatcacaaaaataaatacacatttggctaatcaatttcgggcttggaaaaaacgtatcgccggaagggactatatgactaacttatctagagatacaggaatacaacaatcaaaacttactgaaactatacgtaactgtcaaaaaaatagaaacatatatggtctatatatacactacaatttagttattaattggataaccgatgtgattatcaatcaatattaagagggttggtaaattggtacatagctaataatacctatactccaaatacacccaataatacaacaaccatttctgagttggatatcatcaaaatactaaataaatacgaggacgtgtatagagtaagtaaagaaaaagaatgtggaatttgctatgaagttgtttactcaaaacgatagatactttggtttattggattcgtgtactcatatattttgcataacatgcatcaatatatggcatagaacacgaagagaaaccggtgcgtcggataattgtcctatatgccgtacccgttttagaaacataacaatgagcaagttctataagctagttaactaataaataaaaagtttaatttgttgacgacgtatgtcgttattttttctcgtataaaagattaatttgattctaatataatctttagtattggataaatatcaattcaaattaattccattagattatatcataaataaaaatagtagcacacaactacttcagcaaacattctttttataaatgccatctagcgtagcgaggacacaagtgaacctataattatcaaatttattagtatcagtcacatgaaggactttacgtagagtgacgattccactatctgtggtacgaacggtttcatcttctttgatgccatcacccagatgttctataaacttggtatcctcgtccgatttcatatcctttgccaaccaatacatatagctaaactcaggcatatgttccacacatcctgaacaatgaaattctccagaagatgttacaatgtctagatttggacatttggtttcaaccgcgttaacatatgagtgaacacacccatacatgaaagcgatgagaaataggattctcatcttgccaaaatatcactagaaaaaatttatttatcagttttaaaggtataaaaaatacttattgttgctcgaatattttgtatttgatggtatacggaagattagaaatgtaggtattatcatcaactgattctatggttttatgtattctatcatgtttcactattgcgttggaaataatatcatatgcttccacatatattttattttgttttaactcataatactcacgtaattctggattattggcatatctatgaataattttagctccatgatcagtaaatattaatgagaacatagtattaccacctaccattatttttttcatctcattcaattcttaattgcaaagatctatataatcattatagcgttgacttatggactctggaatcttagacgatgtacagtcatctataatcatggcatatttaatacattgttttatagcatagtcgttatctacgatgttagatatttctctcaatgaatcaatcacacaatctaatgtaggtttatgacataatagcattttcagcagttcaatgtttttagattcgttgatggcaatggctatacatgtatatccgttatttgatctaatgttgacatctgaaccggattctagcagtaaagatactagagattgtttattatatctaacagccttgtgaagaagtgtttctcctcgtttgtcaatcatgttaatgtctttaagataaggtaggcaaatgtttatagtactaagaattgggcaagcataagacatgtcacaaagacccttttttgtatgtataagtgtaaaaattataacatccatagttggatttacataggtgtccaatcgggatctctccatcatcgagataattgatggcatctcccttccttttttagtagatatttcatcgtgtaagaatcaatattaatatttctaaagtatccgtgtatagcctctttatttaccacagctccatattccactagagggatatcgccgaatgtcatatactcaattagtatatgttggaggacatccgagttcattgttttcaatatcaaagagatggtttccttatcatttctccatagtggtacaatactacacattattccgtgcggctttccattttccaaaaacaatttgaccaaatctaaatctacatctttattgtatctataatcactatttagataatcagccataattcctcgagtgcaacatgttagatcgtctatatatgaataagcagtgttatctattcctttcattaacaatttaacgatgtctatatctatatgagatgacttaatataatattgaagagctgtacaatagtttttatctataaaagacggcttgattccgtgattaattagacatttaacaacttccggacgcacatatgctctcgtatccgactctgaatacagatgagagatgatatacagatgcaatacggtaccgcaatttcgtagttgataatcatcatacgcgtatcagtactcgtcctcataaagaacactgcagccattttctatgaacaaatcaataattttagaaacaggatcattgtcattacataattttctataactgaacgatggttttcacatttaacactcaagtcaaatccatgttctaccaacacctttatcaagtcaacgtctacatttttggatttcatatagctgaatatattaaagttatttatgttgctaaatccagtggcttctagtagagccatcgctatatccttattaactttaacatgtctactatttgtgtattcttctaatggggtaagctgtctccaatttttgcgtaatggattagtgccactgtctagtagtagtttgacgacctcgacattattacaatgctcattaaaaaggtatgcgtgtaaagcattattcttgaattggttcctggtatcattaggatctctgtctttcaacatctgtttaagttcatcaagagccacctcctcattttccaaatagtcaaacattttgactgaatgagctactgtgaactctatacacccacacaactaatgtcattaaatatcatgtcaaaaacttgtacaattattaataaaaataatttagtgtttaaattttaccagttccagattttacacctccgttaatacctccattaaccccactggacgatcctcctccccacattccaccgccaccagatgtataagttttagatcctttattactaccatcatgtccatggataaagacactccacatgccgccactaccccctttagaagacatattaataagacttaaggacaagtttaacaataaaattaatcacgagtaccctactaccaacctacactattatatgattatagtttctatttttacagtaccttgactaaagtttctagtcacaagagcaatactaccaacctacactattatatgattatagtttctatttttataggaacgcgtacgagaaaatcaaatgtctaatttctaacggtagtgttgataaacgattgttatccgcggatacctcctctatcatgtcgtctattttcttactttgttctattaacttattagcattatatattatttgattataaaacttatattgcttattagcccaatctgtaaatatcggattattaacatatcgtttctttgtaggtttatttaacatgtacatcactgtaagcatgtccttaccatttattttaatttgacgcatatccgcaatttctttttcgcagtcggttataaattctatatatgatggatacatgctacatgtgtacttataatcgactaatatgaagtacttgatacatattttcagtaacgatttattattaccacctatgaataagtacctgtgatcgtctaggtaatcaactgttttcttaatacattcgatggttggtaatttactcagaataatttccaatatcttaatatataattctgctatttctgggatatatttatctgccagtataacacaaatagtaatacatgtaaacccatattttgttattatattaatgtctgcgccattatctattaaccattctactaggctgacactatgcgactcaatacaatgataaagtatactacatccatgtttatctattttgtttatatcatcaatatacggcttacaaagttttagtatcgataacacatccaactcacgcatagagaaggtagggaataatggcataatatttattaggttatcatcattgtcattatctacaactaagtttccattttttaaaatatactcgacaactttaggatctctattgccaaatttttgaaaatatttatttatatgcttaaatctatataatgtagctccttcatcaatcatacatttaataacattgatgtatactgtatgataagatacatattctaacaatagatcttgtatagaatctgtatatcttttaagaattgtggatattaggatattattacataaactattacacaattctaaaatataaaacgtatcacggtcgaataatagttgatcaactatataattatcgattttgtgatttttcttcctaaactgtttacgtaaatagttagatagaatattcattagttcatgaccactatagttactatcgaataacgcgtcaaatatttcccgtttaatatcgcatttgtcaagataataatagagtgtggtatgttcacgataagtataataacgcatctctttttcgtgtgaaattaaatagtttattacgtccaaagatgtagcataaccatcttgtgacctagtaataatataataatagagaactgttttacccattctatcatcataatcagtggtgtagtcgtaatcgtaatcgtctaattcatcatcccaattataatattcaccagcacgtctaatctgttctattttgatcttgtatccatactgtatgttgctacatgtaggtattcctttatccaataatagtttaaacacatctacattgggatttgatgttgtagcgtatttttctacaatattaataccatttttgatactatttatttctatacctttcgaaattagtaatttcaataagtctatattgatgttatcagaacatagatattcgaatatatcaaaatcattgatatttttatagtcgactgacgacaataacaaaatcacaacatcgtttttgatattattatttttcttggtaacgtatgcctttaatggagtttcaccatcatactcatataatggatttgcaccactttctatcaatgattgtgcactgctggcatcgatgttaaatgttttacaactatcatagagtatcttatcgttaaccatgattggttgttgatgctatcgcattttttggtttctttcatttcagttatgtatggatttagcacgtttgggaagcatgagctcatatgatttcagtactgtagtgtcagtactattagtttcaataagatcaatctctagatctatagaatcaaaacacgataggtcagaagataatgaatatctgtaggcttcttgttgtactgtaacttctggttttgttagatggttgcatcgtgctttaacgtcaatggtacaaattttatcctcgctttgtgtatcatattcgtccctactataaaattgtatattcagattatcatgcgatgtgtatacgctaacggtatcaataaacggagcacaccatttagtcataaccgtaatccaaaaatttttaaagtatatcttaacgaaagaagttgtgtcattgtctacggtgtatggtactagatcctcataagtgtatatatctagagtaatgtttaatttattaaatggttgataatatggatcctcgtgacaatttccgaagatggaaataagacataaacacgcaataaatctaattgcggacatggttactccttaaaaaaatacgaataatcaccttggctatttagtaagtgtcatttaacactatactcatattaatccatggactcataatctctatacgggattaacggatgttctatatacggggatgagtagttctcttctttaactttatactttttactaatcatatttagactgatgtatgggtaatagtgtttgaagagctcgttctcatcatcagaataaatcaatatctctgtttttttgttatacagatgtattacagcctcatatattacgtaatagaacgtgtcatctaccttattaactttcaccgcatagttgtttgcaaatacggttaatcctttgacctcgtcgatttccgaccaatctgggcgtataatgaatctaaactttaattgcttgtaatcattcgaaataatttttagtttgcatccgtagttatcccctttatgtaactgtaaatttctcaacgcgatatctccattaataatgatgtcgaattcgtgctgtatacccatactgaatggatgaacgaataccgacggcgttaatagtaatttactttttcatctttacatattgggtactagttttactatcataagtttataaattccacaagctactatggaataagccaaccatcttagtataccacacatgtcttaaagtttattaattaattacatgttgttttatatatatcgctacgaatttaaagagaaattagtttaggaagaaaaattatctatctacatcatcacgtctctgtattctacgatagagtgctactttaagatgcgacagatccgtgtcatcaaatatatactccattaaaatgattattccggcagcgaacttgatattggatatatcacaacctttgttaatatctacgacaatagacagcagtcccatggttccataaacagtgagtttatctttctttgaagagatattttgtagagatcttataaaactgtcgaatgacatcgcatttatatctttagctaaatcgtatatgttaccatcgtaatatctaaccgcgtctatcttaaacgtttccatcgctttaaagacgtttccgatagatggtctcatttcatcagtcatactgagccaacaaatataatcgtgtataacatctttgatagaatcagactctaaagaaaacgaatcggctttattatacgcattcatgataaacttaatgaaaaatgtttttcgttgtttaagttggatgaatagtatgtcttaataattgttattatttcattaattaatatttagtaacgagtacactctataaaaacgagaatgacataactaatcataactagttatcaaagtgtctaggacgcgtaattttcatatggtatagatcctgtaagcattgtctgtattctggagctattttctctatcgcattagtgagttcagaatatgttataaatttaaatcgaataacgaacataactttagtaaagtcgtctatattaactcttttattttctagccatcgtaataccatgtttaagatagtatattctctagttactacgatctcatcgttgtctagaatatcacatactgaatctacatccaattttagaaattggtctgtgttacatatctcttctatattattgttgatgtattgtcgtagaaaactattacgtagaccattttctttataaaacgaatatatagtactccaattatctttaccgatatatttgcacacataatccattctctcaatcactacatctttaagattttcgttgttaagatatttggctaaactatataattctattagatcatcaacagaatcagtatatatttttctagatccaaagacgaactctttggcgtcctctataatattcccagaaaagatattttcgtgttttagtttatcgagatctgatctgttcatatacgccatgattgtacggtacgttatgataaccgcataaaataaaaatccattttcatttttaaccaatactattcataattgagattgatgtaatactttgttactttgaacgtaaagacagtacacggatccgtatctccaacaagcacgtagtaatcaaatttggtgttgttaaacttcgcaatattcatcaatttagatagaaacttatactcatcatctgttttaggaatccatgtattattaccactttccaacttatcattatcccaggctatgtttcgtccatcatcgttgcgcagagtgaataattcttttgtattcggtagttcaaatatatgatccatgcatagatcggcaaagctattgtagatgtgatttttcctaaatctaatataaaactcgtttactagcaaacactttcctgatttatcgaccaagacacatatggtttctaaatctatcaagtggtggggatccatagttatgacgcagtaacatatattattacattcttgactgtcgctaatatctaaatatttattgttatcgtattggattctgcatatagatggcttgtatgtcaaagatatagaacacataaccaatttatagtcgcgctttacattctcgaatctaaagttaagagatttagaaaacattatatcctcggatgatgttatcactgtttctggagtaggatatattaaagtctttacagatttcgtccgattcaaataaatcactaaataatatcccacattatcatctgttagagtagtatcattaaatctattatattttatgaaagatatatcactgctcacctctatatttcgtacatttttaaactgtttgtataatatctctctgatacaatcagatatatctattgtgtcggtagacgataccgttacatttgaattaatggtgttccattttacaacttttaacaagttgaccaattcatttctaatagtatcaaactctccatgattaaatattttaatagtatccattttatatcactacggacacaaagtagctgacataaaccattgtataatttttatgttttatgtttattagcgtacacattttggaagttccggcttccatgtatttcctggagagcaagtagatgatgaggaaccagatagtttatatccgtacttgcacttaaagtctacattgtcgttgtatgagtatgatcttttaaacccgctagacaagtatccgtttgatattgtaggatgtggacatttaacaatctgacacgtgggtggatcggaccattctcctcctgaacacaggacactagagttaccaatcaacgaatatccactattgcaactataagttacaacgctcccatcggtataaaaatcctcgtatccgttatgtcttccgttggatatagatggaggggattggcatttaacagattcacaaataggtgcctcgggattccataccatagatccagtagatcctaattcacaatacgatttagattcaccgatcaactgatatccgctattacaagagtacgttatactagagccaaagtctactccaccaatatcaagttggccattatcgatatctcgaggcgatgggcatctccgtttaatacattgattaaagagtgtccatccagtacctgtacatttagcatatataggtcccattttttgctttctgtatccaggtagacatagatattctatagtgtctcctatgttgtaattagcattagcatcagtctccacactattcttaaatttcatattaatgggtcgtgacggaatagtacagcatgatagaacgcatcctattcccaacaatgtcaggaacgtcacgctctccaccttcatatttatttatccgtaaaaatgttatcctggacatcgtacaaataataaaaagcccatatatgttcgctattgtagaaattgtttttcacagttgctcaaaaacgatggcagtgacttatgagttacgttacactttggagtctcatctttagtaaacatatcataatattcgatattacgagttgacatatcgaacaaattccaagtatttgattttggataatattcgtattttgcatctgctataattaagatataatcaccgcaagaacacacgaacatctttcctacatggttaaagtacatgtacaattctatccatttgtcttccttaactatatatttgtatagataattacgagtctcgtgagtaattccagtaattacatagatgtcgccgtcgtactctacagcataaactatactatgatgtctaggcatgggagacttttttatccaacgatttttagtgaaacattccacatcgtttaatactacatatttctcatacgtggtataaactccacccattacatatatatcatcgtttacgaataccgacgcgcctgaatatctaggagtaattaagtttggaagtcttatccatttcgaagtgccgtgtttcaaatattctgccacacccgttgaaatagaaaattctaatcctcctattacatataactttccatcgttaacacaagtactaacttctgattttaacgacgacatattagtaaccgttttccattttttcgttttaagatctacccgcgatacggaataaacatgtctattgttaatcatgccgccaataatgtatagacaattatgtaaaacatttgcattatagaattgtctatctgtattaccgactatcgtccaatattctgttctaggagagtaatgggttattgtggatatataatcagagtttttaatgactactatattatgttttataccatttcgtgtcactggctttgtagatttggatatagttaatcccaacaatgatatagcattgcgcatagtattagtcataaacttgggatgtaaaatgttgatgatatctacatcgtttggatttttatgtatccactttaataatatcatagctgtaacatcctcatgatttacgttaacgtcttcgtgggataagatagttgtcagttcatcctttgataattttccaaattctggatcggatgtcaccgcagtaatattgttgattatttctgacatcgacgcattatatagttttttaattccatatcttttagaaaagttaaacatccttatacaatttgtgaaattaatattatgaatcatagtttttacacatagatctactacaggcggaacatcaattattatggcagcaactagtatcatttctacattgtttatggtgatgtttatcttcttccagcgcatatagtctaatagcgattcaaacgcgtgatagtttataccattcaatataatcgcttcatcctttagatggtgatcctgaatgcgtttaaaaaaattatacggagacgccgtaataatttccttattcacttgtataatttccccattgatagaaaatattacgctttccattcttaaagtactataagtaattatagtataatgtaaacgtttatatattcaatatttttataaaaatcattttgacattaattcctttttaaatttccgtctatcatctatagaaacgtattctatgaatttataaaatgcttttacgtgtcctatcgtaggcgatagaaccgctaaaaagcctatcgaatttctacaaaagaatctgttatatggtatagggagagtataaaacattaaatgtccgtacttattaaagtattcagtagccaatcctaactctttcgaatacttattaatggctcttgttctgtacgaatctatttttttgaacaacggacctagtggtatatcttgttctatgtatctaaaataatgtctgactagatccgttagtttaatatccgcagtcatcttgtctagaatggcaaatctaactgcgggtttaggctttagtttagtttctatatctacatctatgtctttatctaacaccaaaaatataatagctaatattttattacaatcatccggatattcttctacgatctcactaactaatgtttctttggttatactagtatagtcactatcggacaaataaagaaaatcagatgatcgatgaataatacatttaaattcatcatctgtaagatttttgagatgtctcattagaatattattagggttagtactcattatcattcggcagctattacttattttattatttttcaccatatagatcaatcattagatcatcaaaatatgtttcaatcatcctaaagagtatggtgaatgactcttcccatctaatttctgaacgttcaccaatgtctctagccactttggcactaatagcgatcattcgcttagcgtcttctatattattaactggttgatttaatctatctagcaatggaccgtcggacagcgtcattctcatgttcttaatcaatgtacatacatcgccgtcatctaccaattcatccaacaacataagctttttaaaatcatcattataataggtttgatcgttgtcatttctccaaagaatatatctaataagtagagtcctcatgcttagttaacaactattttttatgttaaatcaattagtacaccgctatgtttaatacttattcatattttagtttttaggattgagaatcaatacaaaaattaatgcatcattaattttagaaatacttagtttccacgtagtcaatgaaacatttgaactcatcgtacaggacgttctcgtacaggacgtaactataaaccggtttatatttgttcaagatagatacaaatccgataactttttttacgaattctacgggatccactttaaaagtgtcataccgggttctttttatttttttaaacagatcaatggtgtgatgttgattaggtcttttacgaatttgatatagaatagcgtttacatattctccataatggtcaatcgccatttgttcgtatgtcataaattctttaattatatgacactgtgtattatttagttcatccttgttcattgttaggaatctatccaaaatggcaattatactagaactataggtgcgttgtatacacatattgatgtgtctgtttatacaatccatgatatttggatccatgctactaccttcgggtaaaattgtagcatcatataccatttctagtactttaggttcattattatccattgcagaggacgtcatgatcgaatcataaaaaaatatattatttttatgttattttgttaaaaataatcatcgaatacttcgtaagatactccttcatgaacataatcagttacaaaacgtttatatgaagtaaagtatctacgatttttacaaaagtccggatgcataagtacaaagtacgcgataaacggaataataatagatttatctagtctatctttttctatagctttcatagttagatacatggtctcagaagtaggattatgtaacatcagcttcgataaaatgactgggttatttagtcttacacattcgctcatacatgtatgaccgttaactacagagtctacactaaaatgattgaacaatagatagtctaccattgtttcgtattcagatagtacagcgtagtacatggcatcttcacaaattatatcattgtctaatagatatttgacgcatcttatggatcccacttcaacagccatcttaaaatcatattgctttcctttatcattaataatttctagaacatcatctctatcataaaagatacaaatattaactgtttgatccgtaataacattgctagtcaatagcaatttgttaataagatgcgctgggctcaatgtcttaataagaagtgtaagaggactatctccgaatttgttttgtttattaacatccgttgatggaagtaaaagatctataatgtctacattcttgactgttttagagcatacaatatggagaggtgtatttccatcatgatctggttttgagggactaattcctagtttcatcatccatgagattgtagaagcttttggattgtctgacataagatgtctatgaatatgatttttgccaaatttatccactatcctggcttcgaatccgatggacattatttttttaaacactctttctgaaggatctgtacacgccaacaacggaccacatccttcttcatcaaccgagttgttaatcttggctccatactgtaccaataaatttattctctctatgacttcatcatctgttcccgagagataatatagaggtgttttatgctgtttatcacacgcgtttggatctgcgccgtgcgtcagcagcatcgcgactattctattattattaattttagaagctatatgcaatggataatttccatcatcatccgtctcatttggagagtatcctctatgaagaagttcttcgacaaatcgttcatctagtcctttaattccacaatacgcatgtagaatgtgataattatttccagaaggttcgatagcttgtagcatattcctaaatacatctaaatttttactattatatttggcataaagagatagataatactcggccgacataatgttgtccattgtagtataaaaattaatatttctatttctatttctgtatatttgcaacaatttactctctataacaaatatcataacttagtttttttatgtcaagaaggcactggtttagttcatctataaatgtcacgccataactaccacgcatgccatactcagaattatgataaagatatttatccttggggtgtaggtaatggggattaatctttgttggatcagtctctaagttaacacatgtcacacatgatccatttatagttatatcacacgatgatgatttatgaattgattccggaagatcgctatcgtattttgtggttccacaattcatttccatacatgttattgtcacactaatattatgatgaactttatctagccgctgagtggtaaacaacagaacagatagtttattatctttaccaacaccctcagccgctgccacaaatctctgatccgtatccatgatggtcatgtttatttctagtccgtatccagtcaacactatgttagcatttctgtcgatatagctttcactcatatgacactcaccaataatagtagaattaatgtcgtaatttacaccaatagtgagttcggcggcaaagtaccaataccggtaatcttgtcgaggaggacatatagtattcttgtattctaccgaatacccgagagatgcgatacaaaagagcaagactaatttgtaaaccatcttactcaaaatatgtaacaatagtacgatgcaatgagtaagacaataggaaatctatcttatatacacataattattctatcaattttaccaattagttagtgtaatgttaacaaaaatgtgggagaatctaattagtttttctttacacaattgacgtacatgagtctgagttccttgtttttgctaattatttcatccaatttattattcttgacgatatcgagatcttttgtataggagtcaaacttgtattcaacatgcttttctataatcattttagctatttcggcatcatccaatagtacattttccagattagcagaatagatattaatgtcgtatttgaacagagcctgtaacatctcaatgtctttattatctatagccaatttaatgtccggaatgaagagaagggaattattggtgtttgtcgacgtcatatagtcgagcaagagaatcatcatatccacgtgtccattttttatagtgatgtgaatacaactaaggagaatagccagatcaaaagtagatggtatctctgaaagaaagtaggaaacaatacttacatcattaagcatgacggcatgataaaatgaagttttccatccagttttcccatagaacatcagtctccaatttttcttaacaaacagttttaccgtttgcatgttaccactatcaaccgcataatacaatgcggtgtttcccttgtcatcaaattgtgaatcatccagtccactgaatagcaaaatctttactattttggtatcttccaatgtggctgcctgatgtaatggaaattcattctctagaagatttttcaatgctccagcgttcaacaacgtacatactagacgcacgttattatcagctattgcataatacaaggcactatgtccatggacatccgccttaaatgtatctttactagagagaaagcttttcagctgcttagacttccaagtattaattcgtgacagatccatgtctgaaacgagacgctaattagtgtatattttttcattttttataattttgtcatattgcaccagaattaataatatctttaatagatctgattagtagatacatggctatcgcaaaacaacatatacacatttaataaaaataatatttattaagaaaattcagatttcacgtacccatcaatataaataaaataatgattccttacaccgtacccatattaaggagattccaccttacccataaacaatataaatccagtaatatcatgtctgatgatgaacacaaatggtgtattaaattccagtttttcaggagatgatctcgccgtagctaccataatagtagatgcctctgctacagttccttgttcgtcgacatctatctttgcattctgaaacattttataaatatataatgggtccctagtcatatgtttaaacgacgcattatctggattaaacatactaggagccatcatttcggctatcgacttaatatccctcttattttcgatagaaaatttagggagtttaagattgtacactttattccctaattgagacgaccaatagtctaattttgcagccgtgatagaatctgtgaaatgggtcatattatcacctattgccaggtacatactaatattagcatccttatacggaaggcgtaccatgtcatattctttgtcatcgattgtgattgtatttccttgcaatttagtaactacgttcatcatgggaaccgttttcgtaccgtacttattagtaaaactagcattgcgtgttttagtgatatcaaacggatattgccatatacctttaaaatatatagtattaatgattgcccatagagtattattgtcgagcatattagaatctactacattagacataccggatctacgttctactatagaattaattttattaaccgcatctcgtctaaagtttaatctatataggccgaatctatgatattgttgataatacgacggtttaatgcacacagtattatctacgaaactttgataagttagatcagtgtacgtatatttagatgttttcagcttagctaatcctgatattaattctgtaaatgctggacccagatctctttttctcaaatccatagtcttcaataattctattctagtattacctgatgcaggcaatagcgacataaacatagaaaacgaataaccaaacggtgagaagacaatattatcatcttgaatatttttatacgctactataccggcattggtaaatccttgtagacgataggcggacgctgaacacgctaacgatagtatcaataacgcaatcatgattttatggtattaataattaaccttatttttatgttcggtataaaaaaattattgatgtctacacatccttttgtaattgacatctatatatccttttgtataatcaactctaatcactttaacttttacagttttccctaccagtttatccctatattcaacatatctatccatatgcatcttaacactctctgccaagatagcttcagagtgaggatagtcaaaaagataaatatatagagcataatcattctcgtatactctgccctttattacatcacccgcattgggcaacgaataacaaaatgcaagcatcttgttaacgggctcgtaaattgggataaaaattatgtttttattgtcttatatctattttattcaagagaatattcaggaatttctttttccggttgtatctcgtcgcagtatatatcatttgtacattgtttcatattttttaatagtttacaccttttagtaggactagtatcgtacaattcatagctgtattttgaattccaatcacgcataaaaatatcttccaattgttgacgaagacctaatccatcatccggtgtaatattaatagatgctccacatgtatccgtaaagtaatttcctgtccaatttgaggtacctatataggccgttttatcggttaccatatatttggcatggtttaccctagaatacggaatgggaggatcagcatctggtacaataaatagctttacttctatatttatgtttttagattttagcatagcgatagatcttaaaaagtttctcatgataaacgaagatcgttgccagcaactaatcaatagcttaacggatacttgtctgtctatagcggatcttcttaattcatcttctatataaggccaaaacaaaattttacccgccttcgaataaataatagggataaagttcataacagatacataaacgaatttactcgcatttctaatacatgacaataaagcggttaaatcattggttctttccatagtacatagttgttgcggtgcagaagcaataaatacagagtgtggaacgccgcttacgttaatactaagaggatgatctgtattataatacgacggataaaagtttttccaattatatggtagattgttaactccaagataccagtatacctcaaaaatttgagtgagatccgctgccaagttcctattattgaagatcgcaatacccaattccttgacctgagttagtgatctccaatccatgttagcgcttcctaaataaatatgtgtattatcagatatccaaaattttgtatgaagaactcctcctaggatatttgtaatatctatgtatcgtacttcaactccggccatttgtagtctttcaacatcctttaatggtttgttagatttattaacggctactctaactcgtactcctcttttgggtaattgtacaatctcgtttaatattatcgtgccgaaattcgtacccacttcatccgataaactccaataaaaagatgatatatctagtgtttttgtggtattggatagaatttccctccacatgttaaatgtagacaaatatactttatcaaattgcatacctataggaatagtttctgtaatcactgcgattgtattatccggattcattttatttgttaaaagaataatcctatatcacttcactctattaaaaatccaagtttctatttctttcatgactgattttttaacttcatccgtttccttatgaagatgatgtttggcaccttcataaatttttatttctctattacaatttgcatgttgcatgaaataatatgcacctaaaacatcgctaatcttattgtttgttccctggagtatgagagtcggggggtgttaatcttggaaattatttttctaaccttgttggtagccttcaagacctgactagcaaatccagccttaattttttcatgattgactaatgggtcgtattggtatttataaactttatccatatctctagatactgattctggacatagctttccgactggcgcatttggtgtgatggttcccataagtttggcagctagcagattcagtcttgaaacagcatctgcattaactagaggagacattagaatcattgctgtaaacaagtttggattatcgtaagaggctagctcccatggaatgacccaataagtagatttaatagttaccacgtgctgtaccaaagtcatcaatcatcattttttcaccattacttcttccatgtccaatatgatcatgtgagaatactaaaattcctaacgatgatatgttttcagctagttcgtcataacgtccagaatgtttaccagctccatgacttatgaatactaatgccttaggatatgtaataggtttccaatatttacaatatatgtaatcattgtccagattgaacatacagtttgcactcatgattcacgttatataactatcaatattaacagttcgtttgatgatcatattatttttatgttttattgataattgtaaaaacatacaattaaatcaatatagaggaaggagacggctactgtcttttgtaagatagtcatggcgactaaattagattatgaggatgctgttttttactttgtggatgatgataaaatatgtagtcgcgactccatcatcgatctaatagatgaatatattacgtggagaaatcatgttatagtgtttaacaaagatattaccagttgtggaagactgtacaaggaattgatgaagttcgatgatgtcgctatacggtactatggtattgataaaattaatgagattgtcgaagctatgagcgaaggagaccactacatcaattttacaaaagtccatgatcaggaaagtttattcgctaccataggaatatgtgctaaaatcactgaacattggggatacaaaaagatttcagaatctagattccaatcattgggaaacattacagatttgatgaccgacgataatataaacatcttgatactttttctagaaaaaaaattgaattgatgatataggggtcttcataacgcataattattacgttagcattctatatccgtgttaaaaaaaattatcctatcatgtatttgagagttttatatgtagcaaacatgatagctgtgatgccaataagctttagatattcacgcgtgctagtgttagggatggtattatctggtggtgaaatgtccgttatataatctacaaaacaatcatcgcatatagtatgcgatagtagagtaaacatttttatagtttttactggattcatacatcgtctacccaattcggttataaatgaaattgtcgccaatcttacacccaaccccttgttatccattagcatagtattaacttcgttatttatgtcataaactgtaaatgattttgtagatgccatatcatacatgatattcatgtccctattataatcattactaactttatcacaatatatgttgataatatctatatatgatctagtctttgtgggcaactgtctatacaagtcgtctaaacgttgtttactcatatagtatcgaacagccatcattacatggtcccgttccgttgatagataatcgagtatgttagtggacttgtcaaatctatataccatattttctggaagtggatatacatagtcgtgatcaacattattgctagcctcatcttctatatcctgtactataccattatctatatcatctacataatctatgatattattacacataaacatcgacaacatactattgtttattatctaagtcctgttgatccaaacccttgatctcctctatttgtactatctagagattgtacttcttccagttctggataatatatacgttgatagattagctgagctattctatctccagtatttacattaaacgtacattttccattattaataagaatgactcctatgtttcccctataatcttcgtctattacaccacctcctatatcaatgccttttagtgacagaccagacctaggagctattctaccatagcagaacttaggcatggacatactaatatctgtcttaattaactgtctttctcctggagggatagtataatcgtaagcgctatacaaatcatatccggcagcacccggcgattgcctagtaggagatttagctctgttagtttccttaacaaatctaactggtgagttaatattcatgttgaacataaaactaatattttatttcaaaattatttaccatcccatatattccatgaataagtgtgatgattgtacacttctatagtatctatatacgatccacgataaaatcctcctatcaatagcagtttattatccactatgatcaattctggattatccctcggataaataggatcatctatcagagtccatgtattgctggattcacaataaaattccgcatttctaccaaccaagaataaccttctaccgaacactaacgcgcatgatttataatgaggataataagtggatggtccaaactgccactgatcatgattgggtagcaaatattctgtagttgtatcagtttcagaatgtcctcccattacgtatataacattgtttatggatgccactgctggattacatctaggtttcagaagactcggcatattaacccaagcagcatccccgtggaaccaacgctcaacagatgtgggatttggtagacctcctactacgtataatttattgttagcgggtatcccgctagcatacagtctggggctattcatcggaggaattggaatccaattgtttgatatataatttacagctatagcattgttatgtatttcattgttcatccatccaccgatgagatatactacttctccaacatgagtacttgtacacatatggaatatatctataatttgatccatgttcataggatactctatgaatggatacttgtatgatttgcgtggttgtttatcacaatgaaatattttggtacagtctagtatccattttacattatttatacctctgggagaaagataatttgacctgattacatttttgataaggagtagcagatttcctaatttatttcttcgcctcatataccacttaatgacaaaatcaactacataatcctcatctggaacatttagttcatcgctttctagaataagtttcatagatagataatcaaaattgtctatgatgtcatcttccagttccaaaaagtgtttggcaataaagtttttagtatgacataagagattggatagtccgtattctatacccatcatgtaacactcgacacaatattcctttctaaaatctcgtaagataaagtttatacaagtgtagatgataaattctacagaggttaatatagaagcacgtaataaattgacgacgttatgactatctatatatacctttccagtatatgagtaaataactatagaagttaaactgtgaatgtcaaggtctagacaaacccttgtaactggatctttatttttcgtgtatttttgacgtaaatgtgtgcgaaagtaaggagataactttttcaatatcgtagaattgactattatattgcctcctatggcatcaataattgttttgaatttcttagtcatagacaatgctaatatattcttacagtacacagtattgacaaatatcggcatttatgtttctttaaaagtcaacatctagagaaaaatgattatctttttgagacataactcccattttttggtattcacccacacgtttttcgaaaaaattagtttttccttccaatgatatattttccatgaaatcaaacggattggtaacattataaatttttttaaatcccaattcagaaatcaatctatccgcgacgaattctatatatgttttcatcatttcacaattcattcctataagtttaactggaagagccgcagtaagaaattcttgttcaatggatactgcatctgttataatagatctaacggtttcttcactcggtggatgcaataaatgtttaaacatcaaacatgcgaaatcgcagtgcagaccctcgtctctactaattagttcgttggaaaacgtgagtccgggcattaggccacgctttttaagccaaaatatggaagcgaatgatccagaaaagaaaattccttctactgcagcaaaggcaataagtctctctccataaccggcgctgtcatgtatccacttttgagcccaatcggccttcttttttacacaaggcatcgtttctatggcattaaagagatagtttttttcattactatctttaacataagtatcgatcaaaagactatacatttccgaatgaatgttttcaatggccatctgaaatccgtagaaacatctagcctcggtaatctgtacttctgtacaaaatcgttccgccaaattttcattcactattccgtcactggctgcaaaaaacgccaatacatgttttataaaatatttttcgtctggtgttagtttattccaatcattgatatctttagatatatctacttcttccactgtccaaaatgatgcctctgcctttttatacatgttccagatgtcatgatattggattgggaaaataacaaatctatttggatttggtgcaaggatgggttccataactaaattaacaataacaataaattttttttcagttatctatatgcctgtacttggattttttgtacatcgatatcgccgcaatcactacaataattacaagtattattgatagcattgttattagtactatcataattaaattatctacattcatgggtgctgaataatcgttattatcatcattatcattttgtaattgtgacatcatactagataaatcgtttgcgagattgttgtgggaagcgggcatggaggatgcattatcattattatttaacgccttccatttggattcacaaatgttacgcacattcaacattttatggaaactataattttgtgaaaacaaataacaagaaaactcgtcatcgttcaaatttttaacgatagtaaaccgattaaacgtcgagctaatttctaacgctagcgactctgttggatatgggtttccagatatatatcttttcagttcccctacgtatctataatcatctgtaggaaatggaagatatttccatttatctactgttcctaatatcatatgtggtggtgtagtagaaccattaagcgcgaaagatgttatttcgcatcgtattttaacttcgcaataatttctggttagataacgcactctaccagtcaagtcaatgatattagcctttacagatatattcatagtagtcgtaacgatgactccatcttttagatgcgatactcctttgtatgtaccagaatcttcgtacctcaaactcgatatatttaaacaagttaatgagatattaacgcgttttatgaatgatgatatataaccagaagttttatcctcggtggctagcgctataaccttatcattataataccaactagtgtgattaatatgtgacacgtcagtgtgggtacaaatatgtacattatcgtctacgtcgtattcgatacatccgcatacagccaacaaatataaaatgacaaatactctaacgccgttcgtacccatcttgatgcggtttaataaatgttttgatttcaatttattgtaaaaaaagattcggttttatactgttcgatattctcattgcttatattttcatctatcatctccacacagtcaaatccgtggttagcatgcacctcatcaaccggtaaaagactatcggactcttctatcattataactctagaatatttaatttggtcattattaatcaagtcaattatcttatttttaacaaacgtgagtattttactcattttttataaaaacttttagaaatatacagactctatcgtgtgtctatatcttctttttatatccaatgtatttatgtctgatttttcttcatttatcatatataatggtccaaattctacacgtgcttcggattcatccagatcattaaggttcttataattgtaacatccttctcttccctcttctacatcttccttcttattcttattcttagcgtcacagaatctaccacagcaggatcccatgacgagcgtcatattaaactaatccattttcaattataatatatgattagtaatgaccattaaaataaaaaatattcttcataaccggcaagaaagtgaaaagttcacattgaaactatgtcagtagtatacatcatgaaatgatgatatatatatactctattttggtggaggattatatgatataattcgtggataatcatttttaagacacatttctttattcgtaaatcttttcacgttaaatgagtgtccatattttgcaatttcttcatatgatggcggtgtacgtggacgaggctgctcctgttcttgttgtggtcgccgactgtcgtgtctgcgtttagatccctccattatcgcgattgcgtagatggagtactattttataccttgtaattaaatttttttattaattaaacgtataaaaacgttccgtatctgtatttaagagccagatttcgtctaatagaacaaatagctacagtaaaaataactagaataattgctacacccactagaaaccacggatcgtaatacggcaatcggttttcgataataggtggaacgtatattttatttaaggacttaacaattgtctgtaaaccacaatttgcttccgcggatcctgtattaactatctgtaaaagcatatgttgaccgggcggagccgaacattctccgatatctaatttctgtatatctataatattattaacctccgcatacgcattacagttcttttctagcttggataccgcactaggtacatcgtctagatctattcctatttcctcagcgatagctcttctatccttttccggaagcaatgaaatcacttcaataaatgattcaaccatgagtgtgaaactaagtcgagaattactcatgcatttgttagttattcggagcgcgcaatttttaaactgtcctataacctctcctatatgaatagcacaagtgacattagtagggatagaatgttgagctaatttttgtaaataactatctataaaaagattatacaaagttttaaactctttagtttccgccatttatccagtctgagaaaatgtctctcataataaatttttccaagaaactaattgggtgaagaatggaaacctttaatctatatttatcacagtctgttttggtacacatgatgaattcttccaatgccgtactaaattcgatatctttttcgatttctggatatgtttttaataaagtatgaacaaagaaatggaaatcgtaataccagttatgtttaactttgaaattgttttttattttcttgttaatgattccagccacttgggaaaagtcaaagtcgtttaatgccgatttaatacgttcattaaaaacaaactttttatcctttagatgaattattattggttcattggaatcaaaaagtaagatattatcgggtttaagatctgcgtgtaaaaagttgtcgcaacagggtagttcgtagattttaatgtataacagagccatctgtaaaaagataaactttatgtattgtaccaaagatttaaatcctaatttgatagctaactcggtatctactttatctgccgaatacagtgctaggggaaaaattataatgtttcctctttcatattcgtagttagttctcttttcatgttcgaaaaagtgaaacatgcggttaaaatagtttataacattaatattactgttaataactgccggataaaagtgggatagtaatttcacgaatttgatactgtcctttctctcgttaaacgcctttaaaaaaactttagaagaatatctcaatgagagttcctgaccatccatagtttgtatcaataatagcaacatatgaagaacacgtttatacagagtatgtaaaaatgttaatttatagtttaatcccatggcccacgcacacacgattaattttttttcatctccctttagattgttgtatagaaatttgggtactgtgaactccgccgtagtttccatgggactatataattttgtggcctcgaatacaaattttactacatagttatctatcttaaagactataccatatcctcctgtagatatgtgataaaaatcgtcgtttataggataaaatcgtttatccttttgttggaaaaaggatgaattaatgtaatcattctcttctatctttagtagtgtttccttattaaaattcttaaaataatttaacaatctaactgacggagcccaattttggtgtaaatctaattgggacattatattgttaaaatacaaacagtctcctaatataacagtatctgataatctatggggagacatccattgatattcaggggatgaatcattggcaacacccatttattgtacaaaaagccccaatttacaaacgaaagtccaggtttgatagagacaaacaattaactattttgtctctgtttttaacacctccacagtttttaatttctttagtaatgaaattattcacaatatcagtatcttctttatctaccagagattttactaacttgataaccttggctgtctcattcaatagggtagtaatatttgtatgtgtgatattgatatctttttgaattgtttcttttagaagtgattctttgatggtgccagcatacgaattacaataatgcagaaactcggttaacatgcaggaattatagtaagccaattccaattgttgcctgtgttgtattagagtgtcaatatgagcaatggtgtccttgcgtttctctgatagaatgcgagcagcgattttggcgttatcatttgacgatatttctggaatgacgaatcctgtttctactaactttttggtaggacaaagtgaaacaatcaagaagatagcttctcctcctatttgtggaagaaattgaactcctctagatgatctactgacgatagtatctccttgacagatattggaccgaattacagaagtacctggaatgtaaagccctgaaaccccctcattttttaagcagattgttgccgtaaatcctgcactatgcccaagatagagagctcctttggtgaatccatctctatgtttcagtttaaccaagaaacagtcagctggtctaaaatttccatctctatctaatacagcatctaacttgatgtcaggaactatgaccggtttaatgttatatgtaacattgagtaaatccttaagttcataatcatcactgtcatcagttatgtacgatccaaacaatgtttctaccggcatagtggatacgaagatgctatccatcagaatgtttccctgattagtattttctatatagctattcttctttaaacgattttccaaatcagtaactatgttcatttttttaggagtaggacgcctagccagtatggaagaggattttctagatcctctcttcaacatctttgatctcgatggaatgcaaaaccccatagtgaaacaaccaacgataaaaataatattgtttttcactttttataattttaccatctgactcatggattcattaatatctttataagagctactaacgtataattctttataactgaactgagatatatacaccggatctatggtttccataattgagtaaatgaatgctcggcaataactaatggcaaatgtatagaacaacgaaattatactagagttgttaaagttaatattttctatgagctgttccaataaattatttgttgtgactgcgttcaagtcataaatcatcttgatactatccagtaaaccgtttttaagttctggaatattatcatcccattgtaaagcccctaattcgactatcgaatatcctgctctgatagcagtttcaatatcgacggacgtcaatactgtaataaaggtggtagtattgtcatcatcgtgataaactacgggaatatggtcgttagtaggtacggtaactttacacaacgcgatatataactttccttttgtaccatttttaacgtagttgggacgtcctgcagggtattgttttgaagaaatgatatcgagaacagatttgatacgatatttgttggattcctgattattcactataatataatctagacagatagatgattcgataaatagagaaggtatatcgttggtaggataatacatccccattccagtattctcggatactctattgatgacactagttaagaacatgtcttctattctagaaaacgaaaacatcctacatggactcattaaaacttctaacgctcctgattgtgtctcgaatgcctcgtacaaggatttcaaggatgccatagattctttgaccaacgatttagaattgcgtttagcatctgatttttttattaaatcgaatggtcggctctctggtttgctaccccaatgataacaatagtcttgtaaagataaaccgcaagaaaatttatacgcatccatccaaataaccctagcaccatcggatgatattaatgtattattatagattttccatccacaattattgggccagtatactgttagcaacggtatatcgaatagattactcatgtaacctactagaatgatagttcgtgtactagtcataatatctttaatccaatctaaaaaatttaaaattagattttttacactgttaaagttaacaaaagtattacccgggtacgtggatatcatatatggcattggtccattatcagtaatagctccataaactgatacggcgatggtttttatatgtgtttgatctaacgaggaagaaattcgcgcccacaattcatctctagatatgtatttaatatcaaacggtaacacatcaatttcgggacgcgtatatgtttctaaatttttaatccaaatataatgatgacctatatgccctattatcatactgtcaactatagtacacctagggaacttacgatacatctgtttcctataatcgttaaattttacaaatctataacatgctaaaccttttgacgacagccattcattaatttctgatatggaatctgtattctcgataccgtatcgttctaaagccagtgctatatctccctgttcgtgggaacgctttcgtataatatcgatcaacggataatctgaagtttttggagaataatatgactcatgatctatttcgtccataaacaatctagacataggaattggaggcgatgatcttaattttgtgcaatgagtcgtcaatcctataacttctaatcttgtaatattcatcatcgacataatactatctatgttatcatcgtatattagtataccatgaccttcttcatttcgtgccaaaatgatatacagtcttaaatagttacgcaatatctcaatagtttcataattgttagctgttttcatcaaggtttgtatcctgtttaacatgatggcgttctataacgtctctattttctatttttaattttttaaatttttaacgatttactgtggctagatacccaatctctctcaaatatttttttagcctcgcttacaagctgtttatctatactattaaaactgacgaatccgtgattttggtaatgggttccgtcgaaatttgccgaagtgatatgaacatattcgtcgtcgactatcaacaattttgtattattctgaatagtgaaaaccttcacagatagatcattttgaacacacaacgcatctagacttttggcggttgccatagaatatacgtcgttcttatcccaattaccaactagaagtctgatcttaactcctctattaatggctgcttctataatggagttgtaaatgtcgggccaatagtagctattaccgtcgacacgtgtagtgggaactatggccaaatgttcaatatctatactagtcttagctgacctgagtttatcaataactacatcggtatctagatctctagaatatcccaataggtgttccggagaatcagtaaagaacactccacctataggattcttaatatgatacgcagtgctaactggcaaacaacaagccgcagagcataaattcaaccatgaattttttgcgctattaaaggctttaaaagtatcaaatcttctacgaagatctgtggccagcgggggataatcagaatatacacctaacgttttaatcgtatgtatagatcctccagtaaatgacgcgtttcctacataacatctttcatcatctgacacccaaaaacaaccgagtagtagtcccacattattttttttatctatattaacggttataaaatttatatccgggcagtgactttgtagctctcccagatttcttttccctcgttcatctagcaaaactattattttaatccctttttcagatgcctcttttagtttatcaaaaataagcgctcccctagtcgtactcagaggattacaacaaaaagatgctatgtatatatatttcttagctagagtgataatttcgttaaaacattcaaatgttgttaaatgatcggatctaaaatccatattttctggtagtgtttctaccagcctacattttgctcccgcaggtaccgatgcaaatggccacatttagttaacataaaaacttatacatcctgttctatcaacgattctagaatatcatcggctatatcgctaaaattttcatcaaagtcgacatcacaacctaactcagtcaatatattaagaagttccatgatgtcatcttcgtctatttctatatccgtatccattgtagattgttgaccgattatcgagtttaaatcattactaatactcaatccttcagaatacaatctgtgtttcattgtaaatttataggcggtgtatttaagttggtagattttcaattatgtattaatatagcaacagtagttcttgctcctccttgattctagcatcctcttcattattttcttctacgtacataaacatgtccaatacgttagacaacacaccgacgatggcggccgcagatctcgagttatgatctacttccttaccgtgcaataaattagaatatattttctacttttacgagaaattaattattgtatttattatttatgggtgaaaaacttactataaaaagcgggtgggtttggaattagtgaaagcttaaaaattgaaattttattttttttttttggaatataaataagctcgaagtcgacagatctaggcctggtaccaggaggaggaattcagcttaaagatgacttcgaaagtttatgatccagaacaaaggaaacggatgataactggtccgcagtggtgggccagatgtaaacaaatgaatgttcttgattcatttattaattattatgattcagaaaaacatgcagaaaatgctgttatttttttacatggtaacgcggcctcttcttatttatggcgacatgttgtgccacatattgagccagtagcgcggtgtattataccagatcttattggtatgggcaaatcaggcaaatctggtaatggttcttataggttacttgatcattacaaatatcttactgcatggtttgaacttcttaatttaccaaagaagatcatttttgtcggccatgattggggtgcttgtttggcatttcattatagctatgagcatcaagataagatcaaagcaatagttcacgctgaaagtgtagtagatgtgattgaatcatgggatgaatggcctgatattgaagaagatattgcgttgatcaaatctgaagaaggagaaaaaatggttttggagaataacttcttcgtggaaaccatgttgccatcaaaaatcatgagaaagttagaaccagaagaatttgcagcatatcttgaaccattcaaagagaaaggtgaagttcgtcgtccaacattatcatggcctcgtgaaatcccgttagtaaaaggtggtaaacctgacgttgtacaaattgttaggaattataatgcttatctacgtgcaagtgatgatttaccaaaaatgtttattgaatcggatccaggattcttttccaatgctattgttgaaggcgccaagaagtttcctaatactgaatttgtcaaagtaaaaggtcttcatttttcgcaagaagatgcacctgatgaaatgggaaaatatatcaaatcgttcgttgagcgagttctcaaaaatgaacaagcggccgccgccaccatgagcaagggcgaggaactgttcactggcgtggtcccaattctcgtggaactggatggcgatgtgaatgggcacaaattttctgtcagcggagagggtgaaggtgatgccacatacggaaagctcaccctgaaattcatctgcaccactggaaagctccctgtgccatggccaacactggtcactaccttcacctatggcgtgcagtgcttttccagatacccagaccatatgaagcagcatgactttttcaagagcgccatgcccgagggctatgtgcaggagagaaccatctttttcaaagatgacgggaactacaagacccgcgctgaagtcaagttcgaaggtgacaccctggtgaatagaatcgagctgaagggcattgactttaaggaggatggaaacattctcggccacaagctggaatacaactataactcccacaatgtgtacatcatggccgacaagcaaaagaatggcatcaaggtcaacttcaagatcagacacaacattgaggatggatccgtgcagctggccgaccattatcaacagaacactccaatcggcgacggccctgtgctcctcccagacaaccattacctgtccacccagtctgccctgtctaaagatcccaacgaaaagagagaccacatggtcctgctggagtttgtgaccgctgctgggatcacacatggcatggacgagctgtacaagtgagcggccgccctgctagcaagcttgctagcggccgctcgagatctgcggccgctacagacacgaatatgactaaaccgatgaccatttaaaaacccctctctagctttcacttaaactgtatcgatcattcttttagcacatgtataatataaaaacattattctatttcgaatttaggcttccaaaaatttttcatccgtaaaccgataataatatatatagacttgttaatagtcggaataaatagattaatgcttaaactatcatcatctccacgattagagatacaatatttacattctttttgctgtttcgaaactttatcaatacacgttaatacaaacccaggaaggagatattgaaactgaggctgttgaaaatgaaacggtgaatacaataattcagataatgtaaaatcatgattccgtattctgatgatattagaactgctaatggatgtcgatggtatgtatctaggagtatctattttaacaaagcatcgatttgctaatatacaattatccttttgattaattgttattttattcatattcttaaaaggtttcatatttatcaattcttctacattaaaaatttccatttttaatttatgtagccccgcaatactcctcattacgtttcattttttgtctataatatccattttgttcatctcggtacatagattatccaattgagaagcgcatttagtagttttgtacattttaagtttattgacgaatcgtcgaaaactagttatagttaacattttattatttgataccctgatattaatacccctgccgttactattatttataactgatgtaatccacgtaacattggaattaactatcgatagtaatgcatcgacgcttccaaaattgtctattataaactcaccgataatttttttattgcatgttttcatattcattaggattatcaaatctttaatcttattacgattgtatgcgttgatattacaagacgtcattctaaaagacggaggatctccatcaaatgccagacaatcacgtacaaagtacatggaaataggttttgttctattgcgcatcatagatttatatagaacacccgtagaaatactaatttgttttactctataaaatactaatgcatctatttcatcgttttgtataacgtctttccaagtgtcaaattccaaatttttttcattgatagtaccaaattcttctatctctttaactacttgcatagataggtaattacagtgatgcctacatgccgttttttgaaactgaatagatgcgtctagaagcgatgctacgctagtcacaatcaccactttcatatttagaatatatatatgtaaaaatatagtagaatttcattttgtttttttctatgctataaatgaattctcattttgcatctgctcatactccgttttatattaataccaaagaaggaagatatctggttctaaaagccgttaaagtatgcgatgttagaactgtagaatgcgaaggaagtaaagcttcctgcgtactcaaagtagataaaccctcatcgcccgcgtgtgagagaagaccttcgtccccgtccagatgcgagagaatgaataaccctggaaaacaagttccgtttatgaggacggacatgctacaaaatatgttcgcggctaatcgcgataatgtagcttctagacttttgtcctaaaatactattatatccttttcgatattaataaatccgtgtcgtccaggttttttatctctttcagtatgtgaatagataggtattttatctctattcatcatcgaatttaagagatccgataaacattgtttgtattctccagatgtcagcatctgatacaacaatatatgtgcacataaacctctggcacttatttcatgtaccttccccttatcactaaggagaatagtatttgagaaatatgtatacatgatattatcatgaattagatatacagaatttgtaacactctcgaaatcacacgatgtgtcggcgttaagatctaatatatcactcgataacacattttcatctagatacactagacattttttaaagctaaaatagtctttagtagtaacagtaactatgcgattattttcatcgatgatacatttcatcggcatattattacgcttaccatcaaagactataccatgtgtatatctaacgtattctagcatggttgccatacgcgcattaaacttttcaggatctttggatagatcttccaatctatctatttgagaaaacatttttatcatgttcaatagttgaaacgtcggatccactatatagatattatctataaagattttaggaactacgttcatggtatcctggcgaatattaaaactatcaatgatatgattatcgttttcatcttttatcaccatatagtttctaagatatgggattttacttaatataatattatttcccgtgataaattttattagaaaggccaaatctataagaaaagtcctagaattagtctgaagaatatctatatcgccgtatagtatatttggattaattagatatagagaatatgatccgtaacatatacaacttttattatggcgtctaagatattcttccatcaacttattaacatttttgactagggaagatacattatgacgtcccattacttttgccttgtctattactgcgacgttcatagaatttagcatatctcttgccaattcttccattgatgttacattataagaaattttagatgaaattacatttggagctttaatagtaagaactcctaatatgtccgtgtatgtggtcactaatacagattgtagttctataatcgtaaataatttacctatattatatgtttgagtctgtttagaaaagtagctaagtatacgatcttttatttctgatgcagatgtattaacatcggaaaaaaatctttttttattcttttttactaaagatacaaatatgtctttgttaaaaacagttattttctgaatatttctagcttgtaattttaacatatgatattcgttcacactaggtactctgcctaaataggtttctataatctttaatgtaatattaggaaaagtattctgatcaggattcctattcattttgaggatttaaaactctgattattgtctaatatggtctctacgcaaactttttcacagagcgatagagtttttgataactcgtttttcttaagaaatataaaactactgtctccagagctcgctctatcttttattttatctaattcgatacaaactcctgatactggttcagaaagtaattcattaattttcagtcctttatagaagatatttaatatagataatacaaaatcttcagtttttgatatcgatctgattgatcctagaactagatatattaataacgtgctcattaggcagtttatggcagcttgataattagatatagtatattccagttcatatttattagataccgcattgcccagattttgatattctatgaattcctctgaaaataaatccaaaataactagacattctattttttgtggattagtgtactctcttccctctatcatgttcactactggtgtccacgatgataaatatctagagggaatataatatagtccataggatgccaatctagcaatgtcgaataactgtaattttattcttcgctcttcattatgaattgattcttgaggtataaacctaacacaaattatattattagacttttcgtatgtaatgtctttcatgttataagtttttaatcctggaatagaatctattttaatgaggcttttaaacgcagagttctccaacgagtcaaagcataatactctgttgtttttcttatatacgatgttacgattttcttctttgaatggaataggtttttgaattagtttataattacaacataatagataaggaagtgtgcaaatagtacgcggaaaaaacataatagctcccctgttttcatccatggttttaagtaaatgatcactggcttctttagtcaatggatattcgaacattaaccgtttcatcatcattggacagaatccatatttcttaatgtaaagagtgatcaaatcattgtgtttattgtaccatcttgttgtaaatgtgtattcggttatcggatctgctcctttttctattaaagtatcgatgtcaatctcgtctaagaattcaactatatcgacatatttcatttgtatacacataaccattactaacgtagaatgtataggaagagatgtaacgggaacagggtttgttgattcgcaaactattctaatacataattcttctgttaatacgtcttgcacgtaatctattatagatgccaagatatctatataattattttgtaagatgatgttaactatgtgatctatataagtagtgtaataattcatgtattttgatatatgttccaactctgtctttgtgatgtctagtttcgtaatatctatagcatcctcaaaaaatatattcgcatatattcccaagtcttcagttctatcttctaaaaaatcttcaacgtatggaatataataatctattttacctcttctgatatcattaatgatatagtttttgacactatcttctgtcaattgattcttattcactatatctaagaaacggatagcgtccctaggacgaactactgccattaatatctctattatagcttctggacataattcatctattataccagaattaatgggaactattccgtatctatctaacatagttttaagaaagtcagaatctaagacttgatgttcatatattggttcatacatgaaatgatctctattgatgatagtgactatttcattctctgaaaattggtaactcattctatatatgctttccttgttgatgaaggatagaatatactcaatagaatttgtaccaacaaactgttctcttatgaatcgtatatcatcatctgaaataatcatgtaaggcatacatttaacaattagagacttgtctcctgttatcaatatactattcttgtgataatttatgtgtgaggcaaatttgtccacgttctttaattttgttatagtagatatcaaatccaatggagctacagttcttggcttaaacagatatagtttttctggaacaaattctacaacattattataaaggactttgggtagataagtgggatgaaatcctattttaattaatgcgatagccttgtcctcgtgcagatatccaaacgcttttgtgatagtatggcattcattgtctagaaacgctctacgaatatctgtgacagatatcatctttagagaatatactagtcgcgttaatagtactacaatttgtattttttaatctatctcaataaaaaaattaatatgtatgattcaatgtataactaaactactaactgttattgataactagaatcagaatctaatgatgacgtaaccaagaagtttatctactgccaatttagctgcattatttttagcatctcgtttagattttccatcggccttatcgaatactcttccgtcgatgtctacacaggcataaaatgtaggagagttactaggcccaactgattcaatacgaaaagaccaatctctcctagtaatttggcagtactcattaataacggtgacagggttagcatctttccaatcaataatttttttagccggaataacatcatcaaaagacttatgatcctctctcattgatttttcgcgggatacatcatctattatgacgtcagccatagcatcagcatccggcttatccgcctccgttgtcataaaccaacgaggaggaatatcgtcggagctgtacaccatagcactacgttgaagatcgtacagagctttattaacttctcgcttctccatattaagttgtctagttagttgtgcagcagtagctccttcgattccaatgtttttaatagccgcacacacaatctctgcgtcagaacgctcgtcaatatagatcttagacatttttagagagaactaacgcaaccagcaataaaactgaacctactttatcatttttttattcatcatcctctggtggttcgtcgttcctatcaaatgtagctctgattaacccgtcatctataggtgatgctggttctggagattctggaggagatggattattatctggaagaatctctgttatttccttgttttcatgtatcgattgcgttgtaacattaagattgcgaaatgctctaaatttgggaggcttaaagtgttgtttgcaatctctacacgcgtgtctaactagtggaggttcgtcagctgctctagtttgaatcatcatcggcgtagtattcctacttttacagttaggacacggtgtattgtatttctcgtcgagaacgttaaaataatcgttgtaactcacatcctttattttatctatattgtattctactcctttcttaatgcattttataccgaataagagatagcgaaggaattctttttcggtgccgctagtacccttaatcatatcacatagtgttttatattccaaatttgtggcaatagacggtttatttctatacgatagtttgtttctggaatcctttgagtattctataccaatattattctttgattcgaatttagtttcttcgatattagattttgtattacctatattcttgatgtagtactttgatgatttttccatggcccattctattaagtcttccaagttggcatcatccacatattgtgatagtaattctcggatatcagtagcggctaccgccattgatgtttgttcattggatgagtaactactaatgtatacattttccatttataacacttatgtattaactttgttcatttatattttttcattattatgttgatattaacaaaagtgaatatatatatgttaataattgtattgtggttatacggctacaattttataatgagtgaaagtcagtgtccgatgatcaatgacgatagctttactctgaaaagaaagtatcaaatcgatagtgcggagtcaacaataaaaatggataagaagaggataaagtttcagaatagagccaaaatggtaaaagaaataaatcagacaataagagcagcacaaactcattacgagacattgaaactaggatacataaaatttaagagaatgattatgactactactctagaagatatagcaccatctattccaaataatcagaaaacttataaactattctcggacatttcagccatcggcaaagcatcacagaatccgagtaagatggtatatgctctgctgctttacatgtttcccaatttgtttggagatgatcatagattcattcgttatagaatgcatccaatgagtaaaatcaaacacaagatcttctctcctttcaaacttaatcttattagaatattagtggaagaaagattctataataatgaatgcagatctaataaatggagaataattggaacacaagttgataaaatgttgatagctgaatctgataaatatacaatagatgcaaggtataacctaaaacccatgtatagaatcaagggagaatctgaagaagataccctctttatcaaacagatggtagaacaatgtgtgacatcccaggaattggtggaaaaagtgttgaagatactgtttagagatttgttcaagagtggagaatacaaagcgtacagatacgatgatgatgtagaaaatggatttattggattggatacactaaaattaaacattgttcatgatatagttgaaccatgtatgcctgttcgtaggccagtggctaagatactgtgtaaagaaatggtaaataaatactttgagaatccgctacatattattggtaaaaatcttcaagagtgcattgactttgttagtgaataggcatttcatctttctccaatactaattcaaattgttaaattaataatggatagtataaatagttattagttataagatagtaaaaataattattagaataagagtgtagtatcatagataactctcttctataaaaatggattttattcgtagaaagtatcttatatacacagtagaaaataatatagattttttaaaggatgatacattaagtaaagtaaacaattttaccctcaatcatgtactagctctcaagtatctagttagcaattttcctcaacacgttattactaaggatgtattagctaataccaatttttttgttttcatacatatggtacgatgttgtaaagtgtacgaagcggttttacgacacgcatttgatgcacccacgttgtacgttaaagcattgactaagaattatttatcgtttagtaacgcaatacaatcgtacaaggaaaccgtgcataaactaacacaagatgaaaaatttttagaggttgccgaatacatggacgaattaggagaacttataggcgtaaattatgacttagttcttaatccattatttcacggaggggaacccatcaaagatatggaaatcatttttttaaaactgtttaagaaaacagacttcaaagttgttaaaaaattaagtgttataagattacttatttgggcatacctaagcaagaaagatacaggcatagagtttgcggataatgatagacaaaatatatacactctatttcaacaaactggtagaatcgtccatagcaatctaacagaaacgtttagagattatatctttcccggagataagactagctattgggtgtggttaaacgaaagtatagctaatgatgcggatatcgttcttaatagacacgccattaccatgtatgataaaattcttagttatatatactctgagataaaacaaggacgcgttaataaaaacatgcttaagttagtttatatctttgagcctgaaaaagatatcagagaacttctgctagaaatcatatatgatattcctggagatatcctatctattattgatgcaaaaaacgacgattggaaaaaatattttattagtttttataaagctaattttattaacggtaatacatttattagtgatagaacgtttaacgaggacttattcagagttgttgttcaaatagatcccgaatatttcgataatgaacgaattatgtctttattctctacgagtgctgcggacattaaacgatttgatgagttagatattaataacagttatatatctaatataatttatgaggtgaacgatatcacattagatacaatggatgatatgaagaagtgtcaaatctttaacgaggatacgtcgtattatgttaaggaatacaatacatacctgtttttgcacgagtcggatcccatggtcatagagaacggaatactaaagaaactgtcatctataaaatccaagagtagacggctgaacttgtttagcaaaaacattttaaaatattatttagacggacaattggctcgtctaggtcttgtgttagatgattataaaggagacttgttagttaaaatgataaaccatcttaagtctgtggaggatgtatccgcattcgttcgattttctacagataaaaaccctagtattcttccatcgctaatcaaaactattttagctagttataatatttccatcatcgtcttatttcaaaggtttttgagagataatctatatcatgtagaagaattcttggataaaagcatccatctaaccaagacggataagaaatatatacttcaattgataagacacggtagatcatagaacagaccaaatatattattaataatttgtatatacatagatataattatcacacatttttgataaatgggaactgctgcaacaattcagactcccaccaaattaatgaataaagaaaatgcagaaatgattttggaaaaaattgttgatcatatagttatgtatattagtgacgaatcaagtgattcagaaaataatcctgaatatattgattttcgtaacagatacgaagactatagatctctcattataaaaagtgatcacgagtttgtaaagctatgtaaaaatcatgcggagaaaagttctccagaaacgcaacaaatgattatcaaacacatatacgaacaatatcttattccagtatctgaagtactattaaaacctataatgtccatgggtgacataattacatataacggatgtaaagacaatgaatggatgctagaacaactctctaccctaaactttaacaatctccgcacatggaactcatgtagcataggcaatgtaacgcgtctgttttatacattttttagttatctgatgaaagataaactaaatatataagtataatcccattctaatactttaacctgatgtattagcatcttattagaatattaacctaactaaaagacataacataaaaactcattacatagttgataaaaagcggtaggatataaatattatggctgccaccgttccgcgttttgacgacgtgtacaaaaatgcacaaagaagaattctagatcaagaaacattttttagtagaggtctaagtagaccgttaatgaaaaacacatatctatttgataattacgcgtatggatggataccagaaactgcaatttggagtagtagatacgcaaacctagatgctagtgactattatcccatttcgttgggattacttaaaaagttcgagtttctcatgtctctatataaaggtcctattcccgtatatgaagaaaaagtaaatactgaattcatagccaatggatcgttctctggtagatacgtatcatatcttcgaaagttttctgcccttccaacaaacgagtttattagttttttgttactgacttccattccaatctataatatcttgttctggtttaaaaacacacagtttgatattactaaacacacattattcagatacgtctatacagataatgccaaacacctggcgttggctaggtatatgcatcaaacaggagactataagcctttgtttagtcgtctcaaagagaattatatatttaccggtcccgttccaataagtatcaaagatatagatcaccctaatcttagtagagcaagaagtccatccgattatgagacattagctaatattagtactatattgtactttaccaagtatgatccggtattaatgtttttattgttttacgtacctgggtattcaattactacaaaaattactccagccgtagaatatctaatggataaactgaatctaacaaagagcgacgtacaactgttgtaaattattttatgcttcgtaaaatgtaggttttgaaccaaacattctttcaaagaatgagatgcataaaactttattatccaatagattgactatttcggacgtcaatcgtttaaagtaaacttcgtaaaatattctttgatcactgccgagtttaaaacttctatcgataattgtctcatatgttttaatatttacaagttttttggtccatggtacattagccggacaaatatatgcaaaataatatcgttctccaagttctatagtttctggattatttttattatattcagtaactaaatacatattagggttatctgcggatttataatttgagtgatgcattctactcaacataaataattctagaggagacgatctactatcaaattcggatcgtaaatctgtttctaaagaacggagaatatctatacatacctgattagaattcatccgtccttcagacaacatctcagacagtctggttttgtacatcttaatcatattcttatgaaacttggaaacatctcttctagtttcactagtacctttattaattctctcaggtacagattttgaattcgacgatgctgagtatttcatcgttgtatatttcttcttcgattgcataatcagattcttatataccgcctcaaactctattttaaaattattaaacaatactctattattaatcagtcgttctaactctttcgctatttctatagacttatctacatcttgactgtctatctctgtaaacacggagtcggtatctccatacacgctacgaaaacgaaatctgtaatctataggcaacgatgttttcacaatcggattaatatctctatcgtccatataaaatggattacttaatggattggcaaaccgtaacataccgttagataactctgctccatttagtaccgattctagatacaagatcattctacgtcctatggatgtgcaactcttagccgaagcgtatgagtatagagcactatttctaaatcccatcagaccatatactgagttggctactatcttgtacgtatattgcatggaatcatagatggccttttcagttgaactggtagcctgttttagcatctttttatatctggctctctctgccaaaaatgttcttaatagtctaggaatggttccttctatcgatctatcgaaaattgctatttcagagatgaggttcggtagtctaggttcacaatgaaccgtaatatatctaggaggtggatatttctgaagcaatagctgattatttatttcttcttccaatctattggtactaacaacgacaccgactaatgtttccggagatagatttccaaagatacacacattaggatacagactgttataatcaaagattaatacattattactaaacattttttgttttggagcaaataccttaccgccttcataaggaaacttttgttttgtttctgatctaactaagatagttttagtttccaacaatagctttaacagtggacccttgatgactgtactcgctctatattcgaataccatggattgaggaagcacatatgttgacgcacccgcgtctgtttttgtttctactccataatactcccacaaatactgacacaaacaagcatcatgaatacagtatctagccatatctaaagctatgtttagattataatccttatacatctgagctaaatcaacgtcatcctttccgaaagataatttatatgtatcattaggtaaagtaggacataatagtacgactttaaatccattttcccaaatatctttacgaattactttacatataatatcctcatcaacagtcacataattacctgtggttaaaacctttgcaaatgcagcggctttgcctttcgcgtctgtagtatcgtcaccgatgaacgtcatttctctaactcctctatttaatactttacccatgcaactgaacgcgttcttggatatagaatccaatttgtacgaatccaatttttcaaatttttgaatgaatgaatatagatcgaaaaatatagttccattattgttattaacgtgaaacgtagtattggccatgccgcctactcccttatgactagactgatttctctcataaatacagagatgtacagcttcctttttgtccggagatctaaagataattttctctcctgttaataactctagacgattagtaatatatctcagatcaaagttatgtccgttaaaggtaacgacgtagtcgaacgttagttccaacaattgtttagctattcgtaacaaaactatttcagaacatagaactagttctcgttcgtaatccatttccattagtgactgtatcctcaaacatcctctatcgacggcttcttgtatttcctgttccgttaacatctcttcattaatgagcgtaaacaataatcgtttaccacttaaatcgatataacagtaacttgtatgcgagattgggttaataaatacagaaggaaacttcttatcgaagtgacactctatatctagaaataagtacgatcttgggatatcgaatctaggtatttttttagcgaaacagttacgtggatcgtcacaatgataacatccattgttaatctttgtcaaatattgctcgtccaacgagtaacatccgtctggagatatcccgttagaaatataaaaccaactaatattgagaaattcatccatggtggcattttgtatgctgcgtttctttggctcttctatcaaccacatatctgcgacggagcattttctatctttaatatctagattataacttattgtctcgtcaatgtctatagttctcatctttcccaacggcctcgcattaaatggaggaggagacaatgactgatatatttcgtccgtcactacgtaataaaagtaatgaggaaatcgtataaatacggtctcgccatttcgacatctggatttcagatataaaaatctgttttcaccgtgactttcaaaccaattaatgcaccgaacatccatttatagaatttagaaatatattttcatttaaatgaatcccaaacattggggaagagccgtatggaccattatttttatagtactttcgcaagcgggtttagacggcaacatagaagcgtgtaaacgaaaactatatactatagttagcactcttccatgtcctgcatgtagacggcacgcgactatcgctatagaggacaataatgtcatgtctagcgatgatctgaattatatttattattttttcatcagattatttaacaatttggcatctgatcccaaatacgcgatcgatgtgacaaaggttaaccctttataaacttaacccattataaaacttatgattagtcacaactgaaataaccgcgtgattattttttggtataattctacacggcatggtttctgtgactatgaattcaacccccgttacattagtgaaatctttaacaaacagcaagggttcgtcaaagacataaaactcattgtttacaatcgaaatagaccccctatcacacttaaaataaaaaatatccttatcctttaccaccaaataaaattctgattggtcaatgtgaatgtattcacttaacagttccacaaatttatttattaactccgaggcacatacatcgtcggtattttttatggcaaactttactcttccagcatccgtttctaaaaaaatattaacgagttccatttatatcatccaatattattgaaatgacgttgatggacagatgatacaaataagaaggtacggtacctttgtccaccatctcctccaattcatgctctattttgtcattaactttaatgtatgaaaacagtacgccacatgcttccatgacagtgtgtaacactttggatacaaaatgtttgacattagtataattgtccaagactgtcaatctataatagatagtagctataatatattctatgatggtattgaagaagatgacaaccttggcatattgatcatttaacacagacatggtatcaacagatagcttgaatgaaagagaatcagtaattggaataagcgtcttctcgatagagtgtccgtataccaacatgtctgatattttgatgtattccattaaattatttagttttttctttttattctcgttaaacagcatttctgtcaacggaccccaacatcgttgaccgattaagttttgattgatttttccgtgtaaggcgtatctagtcagatcgtatagcctatccaataatccatcgtctgtgtgtagatcacatcgtacactttttaattctctatagaagagcgacagacatctggagcaattacagacagcaatttctttattctctacagatgtaagatacttgaagacattcctatgatgatgcagaattttggataacacggtattgatggtatctgttaccataattcctttgatggctgatagtgtcagagcacaagatttccaatctttgacaatttttagcaccattatctttgttttgatatctatatcagacagcatggtgcgtctgacaacacagggattaagacggaaagatgaaatgattctctcaacatcttcaatagataccttgctattttttctggcattatctatatgtgcgagaatatcctctagagaatcagtatcctttttgatgatagtggatctcaatgacatgggacgtttaaaccttcttattctatcaccagattgcatggtgatttgtcttctttcttttatcataatgtaatctctaaattcatcggcaaattgtctatatctaaaatcataatatgagatgtttacctctacaaatatctgttcgtccaatgttagagtatttacatcagttttgtattccaaattaaacatggcaacggatttaattttatattcctctattaagtcctcgtcgataataacagaatgtagataatcatttaatccgtcgtacatggttggaagatgcttgttgacaaaatctttaattgtcttgatgaaggtgggactatatctaacatcttgattaataaaatttataacattgtccataggatactttgtaactagttttatacacatctcttcatcggtaagtttagacagaatatcgtgaacaggtggtatattatattcatcagatatacgaagaacaatgtccaaatctatattgtttaatatattatatagatgtagcgtagctcctacaggaatatctttaactaagtcaatgatttcatcaaccgttagatctattttaaagttaatcatataggcattgatttttaaaaggtatgtagccttgactacattctcattaattaaccattccaagtcattgtgtgtaagaagattatattctatcataagcttgactacatttggtcccgataccattaaagaattcttatgatataaggaaacagattttaggtactcatctactctacaagaattttggagagccttaacgatatcagtgacgtttattatttcaggaggaaagaatctaacattgagaatatcggaattaatagcttccagatacagtgattttggcaatagtccgtgtaatccataatccagtaacacgagctggtgcttgctagacaccttttcaatgtttaatttttttgaaataagctttgataaagccttcctcgcaaattccggatacatgaacatgtcggcgacatgattaagtattgttttttcattatttttatattttctcaacaagttctcaataccccaatagatgatagaatatcacccaatgcgtccatgttgtctatttccaacaggtcgctatatccaccaatagaagtttttccaaaaaagattctaggaacagttctaccaccagtaatttgttcaaaataatcccgcaattcattttcgggtttaaattctttaatatcgacaatttcatacgctcctcttttgaaactaaacttatttagaatatccagtgcatttctacaaaaaggacatgtatacttgacaaaaattgtcactttgttattggccaacctttgttgtacaaattcctcggccattttaatatttaagtgatataaaactatctcgacttatttaactctttagtcgagatatatggacgcagatagctatatgatagccaactacagaaggcaaacgctataaaaaacataattacgacgagcatatttataaatatttttattcagcattacttgatatagtaatattaggcacagtcaaacattcaaccactctcgatacattaactctctcattttctttaacaaattctgcaatatcttcgtaaaaagattcttgaaactttttagaatatctatcgactctagatgaaatagcgttcgtcaacatactatgttttgtatacataaaggcgcccattttaacagtttctagtgacaaaatgctagcgatcctaggatcctttagaatcacatagattgacgattcgtctctcttagtaactctagtaaaataatcatacaatctagtacgcgaaataatattatccttgacttgaggagatctaaacaatctagttttgagaacatcgataagttcatcgggaatgacatacatactatctttaatagaactcttttcatccagttgaatggattcgtccttaaccaactgattaatgagatcttctattttatcattttccagatgatatgtatgtccattaaagttaaattgtgtagcgcttctttttagtctagcagccaatactttaacatcactaatatcgatatacaaaggagatgatttatctatggcattaagaattcgtttttcgacatccgtcaaaaccaattcctttttgcctgtatcatccagttttccatcctttgtaaagaaattattttctactagactattaataagactgataaggattcctccataattgcacaatccaaactttttaacaaaactagactttacgagatctacaggaatgcgtacttcaggttttttagcttgtgattttttcttttgcggacattttctagtaaccaactcatctaccatttcattgattttagcagtgaaataagctttcaatgcacgggcactgatactattgaaaacgagttgatcttcaaattccgccatttaagttcaccaaacaacttttaaatacaaatatatcaatagtagtagaataagaactataaaaaaaataataattaaccaaccccaacaaccggtattattagttgatgtggtagttttctcatcacttagaacagatttaacaatttctataaagtctgtcaaatcatcttccggagaccccataaatacaccaaatatagcggcgtacaacttatccatttatacattgaatattggcttttctttatcgctatcttcatcatattcatcatcaatatcaacaagtcccagattacgagccagatcttcttctacattttcagtcattgatacacgttcactatctccagagagtccgataacgttagccaccacttctctatcaatgattagtttcttgagcgcgaaagtaatttttgtttccgttccggatctatagaagacgataggtgtgataattgccttggccaattgtctttctcttttactgagtgattctagttcaccttctatagatctgagaatggatgattctccagtcgaaacatattctaccatggatccgtttaatttgttgatgaagatggattcatccttaaatgttttctctgtaatagtttccaccgaaagactatgcaaagaatttggaatgcgttccttgtgcttaatgtttccatagacggcttctagaagttgatacaacataggactagccgcggtaacttttatttttagaaagtatccatcgcttctatcttgtttagatttatttttataaagtttagtctctccttccaacataataaaagtggaagtcatttgactagataaactatcagtaagttttatagagatagacgaacaattagcgtattgagaagcatttagtgtaacgtattcgatacattttgcattagatttactaatcgattttgcatactctataacacccgcacaagtctgtagagaatcgctagatgcagtaggtcttggtgaagtttcaactctcttcttgattaccttactcatgattaaacctaaataattgtactttgtaatataatgatatatattttcactttatctcatttgagaataaaaatgtttttgtttaaccactgcatgatgtacagatttcggaatcgcaaaccaccagtggttttattttatccttgtccaatgtgaattgaatgggagcggatgcgggtttcgtacgtagatagtacattcccgtttttagaccgagactccatccgtaaaaatgcatactcgttagtttggaataactcggatctgctatatggatattcatagattgactttgatcgatgaaggctcccctgtctgcagccatttttatgatcgtcttttgtggaatttcccaaatagttttataaactcgcttaatatcttctggaaggtttgtattctgaatggatccaccatctgccataatcctattcttgatctcatcattccataattttctctcggttaaaactctaaggagatgcggattaactacttgaaattctccagacaatactctccgagtgtaaatattactggtatacggttccaccgactcattatttcccaaaatttgagcagttgatgcagtcggcataggtgccaccaataaactatttctaagaccgtatgttctgattttatcttttagaggttcccaattccaaagatccgacggtacaacattccaaagatcatattgtagaataccgttactggcgtacgatcctacatatgtatcgtatggtccttccttctcagctagttcacaactcgcctctaatgcaccgtaataaatggtttcgaagatcttcttatttagatcttgtgcttccaggctatcaaatggataatttaagagaataaacgcgtccgctaatccttgaacaccaataccgataggtctatgtctcttattagagatttcagcttctggaataggataataattaatatctataattttattgagatttctgacaattactttgaccacatccttcagtttgagaaaatcaaatcgcccatctattacaaacatgttcaaggcaacagatgccagattacaaacggctacctcattagcatccgcatattgtattatctcagtgcaaagattactacacttgatagttcctaaattttgttgattactctttttgttacacgcatccttataaagaatgaatggagtaccagtttcaatctgagattctataatcgctttccagacgactcgagcctttattatagatttgtatctcctttctctttcgtatagtgtatacaatcgttcgaactcgtctccccaaacattgtccaatccaggacattcatccggacacatcaacgaccactctccgtcatccttcactcgtttcataaagagatcaggaatccaaagagctataaatagatctctggttctatgttcctcgtttcctgtattctttttaagatcgaggaacgccataatatcagaatgccacggttccaagtatatggccataactccaggccgtttgtttcctccctgatctatgtatctagcggtgttattataaactctcaacattggaataataccgtttgatataccattggtaccggagatatagcttccactggcacgaatattactaattgatagacctattccccctgccattttagagattaatgcgcatcgttttaacgtgtcatagataccctctatgctatcatcgatcatgttaagtagaaaacagctagacatttggtgacgactagttcccgcattaaataaggtaggagaagcgtgcgtaaaccatttttcagaaagtagattgtacgtctcaatagctgagtctatatcccattgatgaattcctactgcgacacgcattaacatgtgctgaggtctttcaacgatcttgttgtttattttcaacaagtaggatttttccaaagttttaaaaccaaaatagttgtatgaaaagtctcgttcgtaaataataaccgagttgagtttatccttatatttgttaactatatccatggtgatacttgaaataatcggagaatgtttcccatttttaggattaacatagttgaataaatcctccatcacttcactaaatagtttttttgtttccttgtgtagatttgatacggctattctggcggctagaatggcataatccggatgttgtgtagtacaagtggctgctatttcggctgccagagtgtccaattctaccgttgttactccattatatattccttgaataaccttcatagctattttaataggatctatatgatccgtgtttaagccataacataattttctaatacgagacgtgattttatcaaacatgacattttccttgtatccatttcgtttaatgacaaacatttttgttggtgtaataaaaaaattatttaacttttcattaatagggatttgacgtatgtagcgtacaaaatgattgttcctggtatatagataaagagtcctatatatttgaaaatcgttacggctcgattaaactttaatgattgcatagtgaatatatcattaggatttaactccttgactatcatggcggcgccagaaattaccatcaaaagcattaatacagttataccgatcgcagttagaacggttatagcatccaccatttatatctaaaaattagatcaaagaatatgtgacaaagtcctagttgtatactgagaattgacgaaacaatgtttcttacatatttttttcttattagtaaccgacttaatagtaggaactggaaaactagacttgattattctataagtatagatacccttccaaataatattctctttgataaaagttccagaaaatgtagaattttttaaaaagttatcttttgctattaccaagattgtgtttagacgcttattattaatatgagtgatgaaatccacaccgcctctagatatcgcctttatttccacattagatggtaaatccaatagtgaaactatctttttaggaatgtatggactcgcgtttagaggagtaaacgtcttaggcgtcggaaaggatgattcatcaaacgaataaacaatttcacaaatggatgttaatgtattagtaggaaattttttgacgctattggaattgaagattctaatggatgatgttctacctatttcatccgataacatgttaatttccgacaccaacggttttaatatttcgatgatatacggtagtctctctttcggacttatatagcttattccacaatacgagtcattatatactccaaaaaacaaaataactagtataaaatctgtatcgaatgggaaaaacgaaattatcgacataggtatagaatccggaacattgaacgtattaatacttaattctttttctgtggtaagtaccgataggttattgacattgtatggttttaaatattctataacttgagacttgatagatattagtgatgaattgaaaattatttttatcaccacgtgtgtttcaggatcatcgtcgacgcccgtcaaccaaccgaacggagtaaaataaatatcattaatatatgctctagatattagtatttttatcaatcctttgattatcatcttctcgtaggcgaatgattccatgatcaagagtgatttaagaacatcctccggagtattaatgggcttagtaaacagtccatcgttgcaataataaaagttatccaagttaaaggatattatgcattcgtttaaagatatcacctcatctgacggagacaattttttggtaggttttagagactttgaagctacttgtttaacaaagttattcatcgtcgtctactattctatttaattttgtagttaatttatcacatatcacattaattgactttttggtccacttttccatacgtttatattcttttaatcctgcgttatccgtttccgttatatccagggatagatcttgcaagttaaatagaatgctcttaaataatgtcattttcttatccgctaaaaatttaaagaatgtataaacctttttcagagatttgaaactcttaggtggtgtcctagtacacaatatcataaacaaactaataaacattccacattcagattccaacagctgattaacttccacattaatacagcctattttcgctccaaatgtacattcgaaaaatctgaataaaacatcgatgtcacaatttgtattatccaatacagaatgtttgtgattcgtgttaaaaccatcggagaaggaatagaaataaaaattattatagtggtggaattcagttggaatattgcctccggagtcataaaaggatactaaacattgttttttatcataaattacacatttccaatgagacaaataacaaaatccaaacattacaaatctagaggtagaacttttaattttgtctttaagtatatacgataagatatgtttattcataaacgcgtcaaatttttcatgaatcgctaaggagtttaagaatctcatgtcaaattgtcctatataatccacttcggatccataagcaaactgagagactaagttcttaatacttcgattgctcatccaggctcctctctcaggctctattttcatcttgacgacctttggattttcaccagtatgtattcctttacgtgataaatcatcgattttcaaatccatttgtgagaagtctatcgccttagatactttttcccgtagtcgaggtttaaaaaaatacgctaacggtatactagtaggtaactcaaagacatcatatatagaatggtaacgcgtctttaactcgtcggttaactctttcttttgatcgagttcgtcgctactattgggtctgctcaggtgccccgactctactagttccaacatcataccgataggaatacaagacactttgccggcggttgtagatttatcatatttttccactacatatccgttacaatttgttaaaaatttagatacatctatattgctacataatccagctagtgaatatatatgacataataaattggtaaatcctagttctggtattttactaattactaaatctgtatatctttccatttatcatggaaaagaatttaccagatatcttcttttttccaaactgcgttaatgtattctcttacaaatattcacaagatgaattcagtaatatgagtaaaacggaacgtgatagtttctcattggccgtgtttccagttataaaacatagatggcataacgcacacgttgtaaaacataaaggaatatacaaagttagtacagaagcacgtggaaaaaaagtatctcctccatcactaggaaaacccgcacacataaacctaaccgcgaagcaatatatatacagtgaacacacaataagctttgaatgttatagttttctaaaatgtataacaaatacagaaatcaattcgttcgatgagtatatattaagaggactattagaagctggtaatagtttacagatattttccaattccgtaggtaaacgaacagatactataggtgtactagggaataagtatccatttagcaaaattccattggcctcattaactcctaaagcacaacgagagatattttcagcgtggatttctcatagacctgtagttttaactggaggaactggagtgggtaagacgtcacaggtacccaagttattgctttggtttaattatttatttggtggattctctactctagataaaatcactgactttcacgaaagaccagtcattctatctcttcctaggatagctttagttagattgcatagcaataccattttaaaatcattgggatttaaggtactagatggatctcctatttctttacggtacggatctataccggaagaattaataaacaaacaaccaaaaaaatatggaattgtattttctacccataagttatctctaacaaaactatttagttatggcactcttattatagacgaagttcatgagcatgatcaaataggagatattattatagcagtagcgagaaagcatcatacgaaaatagattctatgtttttaatgactgccacgttagaggatgacagggaacggctaaaagtatttttacctaatcccgcatttatacatattcctggagatacactgtttaaaattagcgaggtatttattcataataagataaatccatcttccagaatggcatacatagaagaagaaaagagaaatttagttactgctatacagatgtatactcctcctgatggatcatccggtatagtctttgtggcatccgttgcacagtgtcacgaatataaatcatatttagaaaaaagattaccgtatgatatgtatattattcatggtaaggtcttagatatagacgaaatattagaaaaagtgtattcatcacctaatgtatcgataattatttctactccttatttggaatccagcgttactatacgcaatgttacacacatttatgatatgggtagagtttttgtccccgctccttttggaggatcgcaacaatttatttctaaatctatgagagatcaacgaaaaggaagagtaggaagagttaatcctggtacatacgtctatttctatgatctgtcttatatgaagtctatacagcgaatagattcagaatttctacataattatatattgtacgctaataagtttaatctaacactccccgaagatttgtttataatccctacaaatttggatattctatggcgtacaaaggaatatatagactcgttcgatattagtacagaaacatggaataaattattatccaattattatatgaagatgatagagtatgctaaactttatgtactaagtcctattctcgctgaggagttggataactttgagaggacgggagaattaactagtattgtacgagaagccattttatctctaaatttacaaattaagattttaaattttaaacataaagatgatgatacgtatatacacttttgtaaaatattattcggtgtctataacggaacaaacgctactatatattatcatagacctctaacgggatatatgaatatgatttcagatactatatttgttcctgtagataataactaaaaatcaaactctaatgaccacatctttttttagagatgaaaaattttccacatctccttttgtagacacgactaaacattttgcagaaaaaagtttattagtgtttagataatcgtatacttcatcagtgtagatagtaaatgtgaacagataaaaggtattcttgctcaatagattggtaaattccatagaatatattaatcctttcttcttgagatcccacatcatttcaaccagagacgttttatccaatgatttacctcgtactataccacatacaaaactagattttgcagtgacgtcgtacctggtattcctaccaaacaaaattttacttttagttcttttagaaaattctaaggtagaatctctatttgccaatatgtcatctatggaattaccactagcaaaaaatgatagaaatatatattgatacatcgcagctggttttgatctactatactttaaaaacgaatcagattccataattgcctgtatatcatcagctgaaaaactatgttttacacgtattccttcggcatttctttttaatgatatatcttgtttagacaatgataaagttatcatgtccatgagagacgcgtctccgtatcgtataaatatttcattagatgttagacgcttcattaggggtatacttctataaggtttcttaatcagtccatcattggttgcgtcaagaactactatcggatgttgttgggtatctctagtgttacacatggccttactaaagtttgggtaaataactatgatatctctattaattatagatgcatatatttcattcgtcaaggatattagtatcgacttgctatcgtcattaatacgtgtaatgtaatcatataaatcatgcgatagccaaggaaaatttaaatagatgttcatcatataatcgtcgctataattcatattaatacgttgacattgactaatttgtaatatagcctcgccacgaagaaagctctcgtattcagtttcatcgataaaggataccgttaaatataactggttgccgatagtctcatagtctattaagtggtaagtttcgtacaaatacagaatccctaaaatattatctaatgttggattaatctttaccataactgtataaaatggagacggagtcataactattttaccgtttgtacttactggaatagatgaaggaataatctccggacatgctggtaaagacccaaatgtctgtttgaagaaatccaatgttccaggtcctaatctcttaacaaaaattacgatattcgatcccgatatcctttgcattctatttaccagcatatcacgaactatattaagattatctatcatgtctattctcccaccgttatataaatcgcctccgctaagaaacgttagtatatccatacaatggaatacttcatttctaaaatagtattcgttttctaattctttaatgtgaaatcgtatactagaaagggaaaaattatctttgagttttccgttagaaaagaaccacgaaactaatgttctgattgcgtccgattccgttgctgaattaatggatttacaccaaaaactcatataacttctagatgtagaagcattcgctaaaaaattagtagaatcaaaggatataagtagatgttccaacaagtgagcaattcccaagatttcatctatatcattctcgaatccgaaattagaaattcccaagtagatatcctttttcatccgatcgttgatgaaaatacgaactttattcggtaagacaatcatttactaaggagtaaaataggaagtaatgttcgtatgtcgttatcatcgtataaattaaaggtgtgttttttaccattaagtgacattataattttaccaatattggaattataatataggtgtatttgcgcactcgcgacggttgatgcatcggtaaatatagctgtatctaatgttctagtcggtatttcatcatttcgctgtctaataatagcgttttctctatctgtttccattacagctgcctgaagtttattggtcggataatatgtaaaataataagaaatacatacgaataacaaaaataaaataagatataataaagatgccatttagagatctaattttgtttaacttgtccaaattcctacttacagaagatgaggaatcgttggagatagtgtcttccttatgtagaggatttgaaatatcttataatgacttgataacttactttccagataggaaataccataaatatatttataaagtatttgaacatgtagatttatcggaggaattaagtatggaattccatgatacaactctgagagatttagtctatcttagattgtacaagtattccaagtgtatacggccgtgttataaattaggagataatctaaaaggcatagttgttataaaggacaggaatatttatattagggaagcaaatgatgacttgatagaatatctcctcaaggaatacactcctcagatttatacatattctaatgagcgcgtccccataactggttcaaaattaattctttgtggattttctcaagttacatttatggcgtatacaacgtcgcatataacaacaaataaaaaggtagatgttctcgtttccaaaaaatgtatagatgaactagtcgatccaataaattatcaaatacttcaaaatttatttgataaaggaagcggaacaataaacaaaatactcaggaagatattttattcggtaacaggtggccaaactccataggtagctttttctatttcggattttagaatttccaaattcaccagcgatttatcggttttggtgaaatccaaggatttattaatgtccacaaatgccatttgttttgtctgtggattgtatttgaaaatggaaacgatgtagttagatagatgcgctgcgaagtttcctattagggttccgcgcttcacgtcacccagcatacttgaatcaccatcctttaaaaaaaatgataagatatcaacatggagtatatcatactcgaattttaattcttctactgactcactgacattttcacaaatactacaatacggtttaccgaaaataatcagtacgttcttcatttatgggtatcaaaaacttaaaatcgttactgctggaaaataaatcactgacgatattagatgataatttatacaaagtatacaatggaatatttgtggatacaatgagtatttatatagccgtcgccaattgtgtcagaaacttagaagagttaactacggtattcataaaatacgtaaacggatgggtaaaaaagggagggcatgtaaccctttttatcgatagaggaagtataaaaattaaacaagacgttagagacaagagacgtaaatattctaaattaaccaaggacagaaaaatgttagaattagaaaagtgtacatccgaaatacaaaatgttaccggatttatggaagaagaaataaaggcagaaatgcaattaaaaatcgataaactcacatttcaaatatatttatctgattctgataacataaaaatatcattgaatgagatactaacacatttcaacaataatgagaatgttacattattttattgtgatgaacgagacgcagaattcgttatgtgtctcgaggctaaaacacatttctctaccacaggagaatggccgttgataataagtaccgatcaggatactatgctatttgcatctgctgataatcatcctaagatgataaaaaacttaactcaactgtttaaatttgttccctcggcagaggataactatttagcaaaattaacggcgttagtgaatggatgtgatttctttcctggactctatggggcatctataacacccaccaacttaaacaaaatacaattgtttagtgattttacaatcgataatatagtcactagtttggcaattaaaaattattatagaaagactaactctaccgtagacgtgcgtaatattgttacgtttataaacgattacgctaatttagacgatgtctactcgtatattcctccttgtcaatgcactgttcaagaatttatattttccgcattagatgaaaaatggaatgaatttaaatcatcttatttagaaagcgtgccgttaccctgccaattaatgtacgcgttagaaccacgcaaggagattgatgtttcagaagttaaaactttatcatcttatatagatttcgaaaatactaaatcagatatcgatgttataaaatctatatcctcgatcttcggatattctaacgaaaactgtaacacgatagtattcggcatctataaggataatttactactgagtataaataattcattttactttaacgatagtctgttaataaccaatactaaaagtgataatataataaatataggttactagattaaaaatggtgttccaactcgtgtgctctacatgcggtaaagatatttctcacgaacgatataaattgattatacgaaaaaaatcattaaaggatgtactcgtcagtgtaaagaacgaatgttgtaggttaaaattatctacacaaatagaacctcaacgtaacttaacagtgcaacctctattggatataaactaatatggatccggttaattttatcaagacatatgcgcctagaggttctattatttttattaattataccatgtcattaacaagtcatttgaatccatcgatagaaaaacatgtgggtatttattatggtacgttattatcggaacacttggtagttgaatctacctatagaaaaggagttcgaatagtcccattggatagtttttttgaaggatatcttagtgcaaaagtatacatgttagagaatattcaagttatgaaaatagcagctgatacgtcattaactttattgggtattccgtatggatttggtcatgatagaatgtattgttttaaattggtagctgactgttataaaaatgccggtattgatacatcgtctaaacgaatattgggcaaagatatttttctgagccaaaacttcacagacgataatagatggataaagatatatgattctaataatttaacattttggcaaattgattaccttaaagggtgagttaatatgcataactactcctccgttgttttttccctcgttctttttcttaacgttgtttgccatcactctcataatgtaaagatattctaaaatggtaaacttttgcatatcggacgcagaaattggtataaatgttgtaattgtattatttcccgtcaatggactagtcacagctccatcagttttatatcctttagagtatttctcactcgtgtctaacattctagagcattccatgatctgtttatcgttgatattggccggaaagatagattttttattttttattatattactattggcaattgtagatataacttctggtaaatatttttctaccttttcaatctcttctattttcaagccggctatatattctgctatattgttgctagtatcaataccttttctggctaagaagtcatatgtggtattcactatatcagttttaactggtagttccattagcctttccacttctgcagaataatcagaaattggttctttaccagaaaatccagctactataataggctcaccgatgatcattggcaaaatcctatattgtaccagattaatgagagcatatttcatttccaataattctgctagttcttgagacattgatttatttgatgaatctagttggttctctagatactctaccatttctgccgcatacaataacttgttagataaaatcagggttatcaaagtgtttagcgtggctagaatagtgggcttgcatgtattaaagaatgcggtagtatgagtaaaccgttttaacgaattatatagtctccagaaatctgtggcgttacatacatgagccgaatgacatcgaagattgtccaatatttttaatagctgctctttgtccattatttctatatttgactcgcaacaattgtagataccattaatcaccgattcctttttcgatgccggacaatagcacaattgtttagctttggactctatgtattcagaattaatagatatatctctcaatacagattgcactatacattttgaaactatgtcaaaaattgtagaacgacgctgttctgcagccatttaactttaaataatttacaaaaatttaaaatgagcatccgtataaaaatcgataaactgcgccaaattgtggcatatttttcagagttcagtgaagaagtgtctataaatgtagactcgacggatgagttaatgtatatttttgccgccttgggcggatctgtaaacatttgggcaattatacctctaagtgcatcagtgttttaccgaggagccgaaaatattgtgtttaatcttcctgtgtccaaggtaaaatcgtgtttgtgtagttttcacaatgatgccatcatagatatagaacctgatctggaaaataatctagtaaaactttctagttatcatgtagtaagtgtcgattgtaacaaggaactgatgcctattaggacagatactactatttgtctaagtatagatcaaaagaaatcttacgtgtttaattttcacaagtatgaagaaaaatgttgtggtagaaccgtcattcatctagaatggttgttgggctttatcaagtgtattagtcagcatcagcatctggctattatgtttaaagatgacaatattattatgaagactcctggtaatactgatgcgttttccagggaatattctatgactgaatgttctcaagaactacaaaagttttctttcaaaatagctatctcgtctctcaacaaactacgaggattcaaaaagagagtcaatgtttttgaaactagaatcgtaatggataatgacgataacattttaggaatgttgttttcggatagagttcaatcctttaagatcaacatctttatggcgtttttagattaatactttcaatgagataaatatgggtggcggagtaagtgttgagctccctaaacgggatccgcctccgggagtacccactgatgagatgttattaaacgtggataaaatgcatgacgtgatagctcccgctaagcttttagaatatgtgcatataggaccactagcaaaagataaagaggataaagtaaagaaaagatatccagagtttagattagtcaacacaggacccggtggtctttcggcattgttaagacaatcgtataatggaaccgcacccaattgctgtcgcacttttaatcgtactcattattggaagaaggatggaaagatatcagataagtatgaagagggtgcagtattagaatcgtgttggccagacgttcacgacactggaaaatgcgatgttgatttattcgactggtgtcagggggatacgttcgatagaaacatatgccatcagtggatcggttcagcctttaataggagtaatagaactgtagagggtcaacaatcgttaataaatctgtataataagatgcaaacattatgtagtaaagatgctagtgtaccaatatgcgaatcatttttgcattatttacgcgcacacaatacagaagatagcaaagagatgatcgattatattctaagacaacagtctgcggactttaaacagaaatatatgagatgtagttatcccactagagataagttagaagagtcattaaaatatgcggaacctcgagaatgttgggatccagagtgttcgaatgccaatgttaatttcttactaacacgtaattataataatttaggactttgcaatattgtacgatgtaataccagcgtgaacaacttacagatggataaaacttcctcattaagattgtcatgtggattaagcaatagtgatagattttctactgttcccgtcaatagagcaaaagtagttcaacataatattaaacactcgttcgacctaaaattgcatttgatcagtttattatctctcttggtaatatggatactaattgtagctatttaaatgggtgccgcggcaagcatacagacgacggtgaatacactcagcgaacgtatctcgtctaaattagaacaagaagcgaacgctagtgctcaaacaaaatgtgatatagaaatcggaaatttttatatccgacaaaaccatggatgtaacctcactgttaaaaatatgtgctctgcggacgcggatgctcagttggatgctgtgttatcagccgctacagaaacatatagtggattaacaccggaacaaaaagcatacgtgccagctatgtttactgctgcgttaaacattcagacgagtgtaaacactgttgttagagattttgaaaattatgtgaaacagacttgtaattctagcgcggtcgtcgataacaaattaaagatacaaaacgtaatcatagatgaatgttacggagccccaggatctccaacaaatttggaatttattaatacaggatctagcaaaggaaattgtgccattaaagcgttgatgcaattgacgactaaggccactactcaaatagcacctagacaagttgctggtacaggagttcagttttatatgattgttatcggtgttataatattggcagcgttgtttatgtactatgccaagcgtatgttgttcacatccaccaatgataaaatcaaacttattttagccaataaggaaaacgtccattggactacttacatggacacattctttagaacttctccgatggttattgctaccacggatatgcaaaactgaaaatatattgataatattttaatagattaacatggaagttatcgctgatcgtctagacgatatagtgaaacaaaatatagcggatgaaaaatttgtagattttgttatacacggtctagagcatcaatgtcctgctatacttcgaccattaattaggttgtttattgatatactattatttgttatagtaatttatatttttacggtacgtctagtaagtagaaattatcaaatgttgttggtggtgctagtcatcacattaactattttttattactttatactataatagtactagactgacttctaacaaacatctcacctgccataaataaatgcttgatattaaagtcttctatttctaacactattccatctgtggaaaataatactctgacattatcgctaattgacacatcggtgagtgatatgcctataaagtaataatcttctttgggcacatataccagtgtaccaggttctaacaacctatttactggtgctcctgtagcatactttttctttaccttgagaatatccatcgtttgcttggtcaatagcgatatgtgattttttatcaaccactcaaaaaagtaattggagtgttcatatcctctacgggctattgtctcatggccgtgtatgaaatttaagtaacacgactgtggtagatttgttctatagagccgattgccgcaaatagatagaactaccaatatgtctgtacaaatgttaaacattaattgattaacagaaaaaacaatgttcgttctgggaatagaaaccagatcaaaacaaaattcgttagaatatatgccacgtttatacatggaatataaaataactacagtttgaaaaataacagtatcatttaaacatttaacttgcggggttaatctcacaactttactgtttttgaactgttcaaaatatagcatcgatccgtgagaaatacgtttagccgcctttaatagaggaaatcccaccgcctttctggatctcaccaacgacgatagttctgaccagcaactcatttcttcatcatccacctgttttaacatataataggcaggagatagatatccgtcattgcaatattccttctcgtaggcacacaatctaatattgataaaatctccattctcttctctgcatttattatcttgtctcggtggctgattaggctgtggtcttggtttaggccttggtctatcgttgttgaatctattttggtcattaaatctttcatttcttcctggtatatttctatcacctcgtttggttggatttttgtctatattatcgtttgtaacatcggtacgggtattcatttatcacaaaaaaaacttctctaaatgagtctactgctagaaaacctcatcgaagaagataccatattttttgcaggaagtatatctgagtatgatgatttacaaatggttattgccggcgcaaaatccaaatttccaagatctatgctttctatttttaatatagtacctagaacgatgtcaaaatatgagttggagttgattcataacgaaaatatcacaggagcaatgtttaccacaatgtataatataagaaacaatttgggtctaggagatgataaactaactattgaagccattgaaaactatttcttggatcctaacaatgaagttatgcctcttattattaataatacggatatgactgccgtcattcctaaaaaaagtggtaggagaaagaataagaacatggttatcttccgtcaaggatcatcacctatcttgtgcattttcgaaactcgtaaaaagattaatatttataaagaaaatatggaatccgcgtcgactgagtatacacctatcggagacaacaaggctttgatatctaaatatgcgggaattaatgtcctgaatgtgtattctccttccacatccataagattgaatgccatttacggattcaccaataaaaataaactagagaaacttagtactaataaggaactagaatcgtatagttctagccctcttcaagaacccattaggttaaatgattttctgggactattggaatgtgttaaaaagaatattcctctaacagatattccgacaaaggattgattactataaatggagaatgttcctaatgtatactttaatcctgtgtttatagagcccacgtttaaacattctttattaagtgtttataaacacagattaatagttttatttgaagtattcgttgtattcattctaatatatgtattttttagatctgaattaaatatgttcttcatgcctaaacgaaaaatacccgatcctattgatagattacgacgtgctaatctagcgtgtgaagacgataaattaatgatctatggattaccatggatgacaactcaaacatctgcgttatcaataaatagtaaaccgatagtgtataaagattgtgcaaagcttttgcgatcaataaatggatcacaaccagtatctcttaacgatgttcttcgcagatgatgattcattttttaagtatttggctagtcaagatgatgaatcttcattatctgatatattgcaaatcactcaatatctagactttctgttattattattgatccaatcaaaaaataaattagaagctgtgggtcattgttatgaatctctttcagaggaatacagacaattgacaaaattcacagactttcaagattttaaaaaactgtttaacaaggtccctattgttacagatggaagggtcaaacttaataaaggatatttgttcgactttgtgattagtttgatgcgattcaaaaaagaatcctctctagctaccaccgcaatagatcctgttagatacatagatcctcgtcgcaatatcgcattttctaacgtgatggatatattaaagtcgaataaagtgaacaataattaattctttattgtcatcatgaacggcggacatattcagttgataatcggccccatgttttcaggtaaaagtacagaattaattagacgagttagacgttatcaaatagctcaatataaatgcgtgactataaaatattctaacgataatagatacggaacgggactatggacgcatgataagaataattttgaagcattggaagcaactaaactatgtgatgtcttggaatcaattacagatttctccgtgataggtatcgatgaaggacagttctttccagacattgttgaattagatcgataaaaattaattaattacccgggtaccaggcctagatctgtcgagatccggtggtggtgcaaatcaaagaactgctcctcagtggatgttgcctttacttctaggcctgtacggaagtgttacttctgctctaaaagctgctgcagggggggggggggggtgggggggccggttagggccgccatcccctcagagcgtcgggatatcgggtggcggctcgggacggaggacgcgctagtgttcttctgtgtggcagttcagaatgatggatcaagctagatcagcattctctaacttgtttggtggagaaccattgtcatatacccggttcagcctggctcggcaagtagatggcgataacagtcatgtggagatgaaacttgctgtagatgaagaagaaaatgctgacaataacacaaaggccaatgtcacaaaaccaaaaaggtgtagtggaagtatctgctatgggactattgctgtgatcgtctttttcttgattggatttatgattggctacttgggctattgtaaaggggtagaaccaaaaactgagtgtgagagactggcaggaaccgagtctccagtgagggaggagccaggagaggacttccctgcagcacgtcgcttatattgggatgacctgaagagaaagttgtcggagaaactggacagcacagacttcaccagcaccatcaagctgctgaatgaaaattcatatgtccctcgtgaggctggatctcaaaaagatgaaaatcttgcgttgtatgttgaaaatcaatttcgtgaatttaaactcagcaaagtctggcgtgatcaacattttgttaagattcaggtcaaagacagcgctcaaaactcggtgatcatagttgataagaacggtagacttgtttacctggtggagaatcctgggggttatgtggcgtatagtaaggctgcaacagttactggtaaactggtccatgctaattttggtactaaaaaagattttgaggatttatacactcctgtgaatggatctatagtgattgtcagagcagggaaaatcacctttgcagaaaaggttgcaaatgctgaaagcttaaatgcaattggtgtgttgatatacatggaccagactaaatttcccattgttaacgcagaactttcattctttggacatgctcatctggggacaggtgacccttacacacctggattcccttccttcaatcacactcagtttccaccatctcggtcatcaggattgcctaatatacctgtccagacaatctccagagctgctgcagaaaagctgtttgggaatatggaaggagactgtccctctgactggaaaacagactctacatgtaggatggtaacctcagaaagcaagaatgtgaagctcactgtgagcaatgtgctgaaagagataaaaattcttaacatctttggagttattaaaggctttgtagaaccagatcactatgttgtagttggggcccagagagatgcatggggccctggagctgcaaaatccggtgtaggcacagctctcctattgaaacttgcccagatgttctcagatatggtcttaaaagatgggtttcagcccagcagaagcattatctttgccagttggagtgctggagactttggatcggttggtgccactgaatggctagagggatacctttcgtccctgcatttaaaggctttcacttatattaatctggataaagcggttcttggtaccagcaacttcaaggtttctgccagcccactgttgtatacgcttattgagaaaacaatgcaaaatgtgaagcatccggttactgggcaatttctatatcaggacagcaactgggccagcaaagttgagaaactcactttagacaatgctgctttccctttccttgcatattctggaatcccagcagtttctttctgtttttgcgaggacacagattatccttatttgggtaccaccatggacacctataaggaactgattgagaggattcctgagttgaacaaagtggcacgagcagctgcagaggtcgctggtcagttcgtgattaaactaacccatgatgttgaattgaacctggactatgagaggtacaacagccaactgctttcatttgtgagggatctgaaccaatacagagcagacataaaggaaatgggcctgagtttacagtggctgtattctgctcgtggagacttcttccgtgctacttccagactaacaacagatttcgggaatgctgagaaaacagacagatttgtcatgaagaaactcaatgatcgtgtcatgagagtggagtatcacttcctctctccctacgtatctccaaaagagtctcctttccgacatgtcttctggggctccggctctcacacgctgccagctttactggagaacttgaaactgcgtaaacaaaataacggtgcttttaatgaaacgctgttcagaaaccagttggctctagctacttggactattcagggagctgcaaatgccctctctggtgacgtttgggacattgacaatgagttttaaatgtgatacccatagcttccatgagaacagcagggtagtctggtttctagacttgtgctgatcgtgctaaattttcagtagggctacaaaacctgatgttaaaattccatcccatcatcttggtactactagatgtctttaggcagcagcttttaatacagggtagataacctgtacttcaagttaaagtgaataaccacttaaaaaatgtccatgatggaatattcccctatctctagaattttaagtgctttgtaatgggaactgcctctttcctgttgttgttaatgaaaatgtcagaaaccagttatgtgaatgatctctctgaatcctaagggctggtctctgctgaaggttgtaagtggtcgcttactttgagtgatcctccaacttcatttgatgctaaataggagataccaggttgaaagaccttctccaaatgagatctaagcctttccataaggaatgtagctggtttcctcattcctgaaagaaacagttaactttcagaagagatgggcttgttttcttgccaatgaggtctgaaatggaggtccttctgctggataaaatgaggttcaactgttgattgcaggaataaggccttaatatgttaacctcagtgtcatttatgaaaagaggggaccagaagccaaagacttagtatattttcttttcctctgtcccttcccccataagcctccatttagttctttgttatttttgtttcttccaaagcacattgaaagagaaccagtttcaggtgtttagttgcagactcagtttgtcagactttaaagaataatatgctgccaaattttggccaaagtgttaatcttaggggagagctttctgtccttttggcactgagatatttattgtttatttatcagtgacagagttcactataaatggtgtttttttaatagaatataattatcggaagcagtgccttccataattatgacagttatactgtcggttttttttaaataaaagcagcatctgctaataaaacccaacagatactggaagttttgcatttatggtcaacacttaagggttttagaaaacagccgtcagccaaatgtaattgaataaagttgaagctaagatttagagatgaattaaatttaattaggggttgctaagaagcgagcactgaccagataagaatgctggttttcctaaatgcagtgaattgtgaccaagttataaatcaatgtcacttaaaggctgtggtagtactcctgcaaaattttatagctcagtttatccaaggtgtaactctaattcccattttgcaaaatttccagtacctttgtcacaatcctaacacattatcgggagcagtatcttccataatgtataaagaacaaggtagtttttacctaccacagtgtctgtatcggagacagtgatctccatatgttacactaagggtgtaagtaattatcgggaacagtgtttcccataattttcttcatgcaatgacatcttcaaagcttgaagatcgttagtatctaacatgtatcccaactcctataattccctatcttttagttttagttgcagaaacattttgtggtcattaagcattgggtgggtaaattcaaccactgtaaaatgaaattactacaaaatttgaaatttagcttgggtttttgttacctttatggtttctccaggtcctctacttaatgagatagtagcatacatttataatgtttgctattgacaagtcattttaactttatcacattatttgcatgttacctcctataaacttagtgcggacaagttttaatccagaattgaccttttgacttaaagcagagggactttgtatagaaggtttgggggctgtggggaaggagagtcccctgaaggtctgacacgtctgcctacccattcgtggtgatcaattaaatgtaggtatgaataagttcgaagctccgtgagtgaaccatcattataaacgtgatgatcagctgtttgtcatagggcagttggaaacggcctcctagggaaaagttcatagggtctcttcaggttcttagtgtcacttacctagatttacagcctcacttgaatgtgtcactactcacagtctctttaatcttcagttttatctttaatctcctcttttatcttggactgacatttagcgtagctaagtgaaaaggtcatagctgagattcctggttcgggtgttacgcacacgtacttaaatgaaagcatgtggcatgttcatcgtataacacaatatgaatacagggcatgcattttgcagcagtgagtctcttcagaaaacccttttctacagttagggttgagttacttcctatcaagccagtacgtgctaacaggctcaatattcctgaatgaaatatcagactagtgacaagctcctggtcttgagatgtcttctcgttaaggagatgggccttttggaggtaaaggataaaatgaatgagttctgtcatgattcactattctagaacttgcatgacctttactgtgttagctctttgaatgttcttgaaattttagactttctttgtaaacaaatgatatgtccttatcattgtataaaagctgttatgtgcaacagtgtggagattccttgtctgatttaataaaatacttaaacactgaaaaaaaaaaaaaaaaaaaaaaaaaaaaaaaaaaaaaaaaaaaaaaaaaaaaaaaaaaaaaaaaaaaaaaaaaaaaaaaaagtaccttctgaggcggaaagaaccagccggatctcgacttcgagcttatttatattccaaaaaaaaaaaataaaatttcaatttttaagctttcactaattccaaacccacccgctttttatagtaagtttttcacccataaataataaatacaataattaatttctcgtaaaagtagaaaatatattctaatttattgcacggtaaggaagtagatcataactcgagcatgggagatcccgtcgttttacaacgtcgtgactgggaaaaccctggcgttacccaacttaatcgccttgcagcacatccccctttcgccagctggcgtaatagcgaagaggcccgcaccgatcgcccttcccaacagttgcgcagcctgaatggcgaatggcgctttgcctggtttccggcaccagaagcggtgccggaaagctggctggagtgcgatcttcctgaggccgatactgtcgtcgtcccctcaaactggcagatgcacggttacgatgcgcccatctacaccaacgtgacctatcccattacggtcaatccgccgtttgttcccacggagaatccgacgggttgttactcgctcacatttaatgttgatgaaagctggctacaggaaggccagacgcgaattatttttgatggcgttaactcggcgtttcatctgtggtgcaacgggcgctgggtcggttacggccaggacagtcgtttgccgtctgaatttgacctgagcgcatttttacgcgccggagaaaaccgcctcgcggtgatggtgctgcgctggagtgacggcagttatctggaagatcaggatatgtggcggatgagcggcattttccgtgacgtctcgttgctgcataaaccgactacacaaatcagcgatttccatgttgccactcgctttaatgatgatttcagccgcgctgtactggaggctgaagttcagatgtgcggcgagttgcgtgactacctacgggtaacagtttctttatggcagggtgaaacgcaggtcgccagcggcaccgcgcctttcggcggtgaaattatcgatgagcgtggtggttatgccgatcgcgtcacactacgtctgaacgtcgaaaacccgaaactgtggagcgccgaaatcccgaatctctatcgtgcggtggttgaactgcacaccgccgacggcacgctgattgaagcagaagcctgcgatgtcggtttccgcgaggtgcggattgaaaatggtctgctgctgctgaacggcaagccgttgctgattcgaggcgttaaccgtcacgagcatcatcctctgcatggtcaggtcatggatgagcagacgatggtgcaggatatcctgctgatgaagcagaacaactttaacgccgtgcgctgttcgcattatccgaaccatccgctgtggtacacgctgtgcgaccgctacggcctgtatgtggtggatgaagccaatattgaaacccacggcatggtgccaatgaatcgtctgaccgatgatccgcgctggctaccggcgatgagcgaacgcgtaacgcgaatggtgcagcgcgatcgtaatcacccgagtgtgatcatctggtcgctggggaatgaatcaggccacggcgctaatcacgacgcgctgtatcgctggatcaaatctgtcgatccttcccgcccggtgcagtatgaaggcggcggagccgacaccacggccaccgatattatttgcccgatgtacgcgcgcgtggatgaagaccagcccttcccggctgtgccgaaatggtccatcaaaaaatggctttcgctacctggagagacgcgcccgctgatcctttgcgaatacgcccacgcgatgggtaacagtcttggcggtttcgctaaatactggcaggcgtttcgtcagtatccccgtttacagggcggcttcgtctgggactgggtggatcagtcgctgattaaatatgatgaaaacggcaacccgtggtcggcttacggcggtgattttggcgatacgccgaacgatcgccagttctgtatgaacggtctggtctttgccgaccgcacgccgcatccagcgctgacggaagcaaaacaccagcagcagtttttccagttccgtttatccgggcaaaccatcgaagtgaccagcgaatacctgttccgtcatagcgataacgagctcctgcactggatggtggcgctggatggtaagccgctggcaagcggtgaagtgcctctggatgtcgctccacaaggtaaacagttgattgaactgcctgaactaccgcagccggagagcgccgggcaactctggctcacagtacgcgtagtgcaaccgaacgcgaccgcatggtcagaagccgggcacatcagcgcctggcagcagtggcgtctggcggaaaacctcagtgtgacgctccccgccgcgtcccacgccatcccgcatctgaccaccagcgaaatggatttttgcatcgagctgggtaataagcgttggcaatttaaccgccagtcaggctttctttcacagatgtggattggcgataaaaaacaactgctgacgccgctgcgcgatcagttcacccgtgcaccgctggataacgacattggcgtaagtgaagcgacccgcattgaccctaacgcctgggtcgaacgctggaaggcggcgggccattaccaggccgaagcagcgttgttgcagtgcacggcagatacacttgctgatgcggtgctgattacgaccgctcacgcgtggcagcatcaggggaaaaccttatttatcagccggaaaacctaccggattgatggtagtggtcaaatggcgattaccgttgatgttgaagtggcgagcgatacaccgcatccggcgcggattggcctgaactgccagctggcgcaggtagcagagcgggtaaactggctcggattagggccgcaagaaaactatcccgaccgccttactgccgcctgttttgaccgctgggatctgccattgtcagacatgtataccccgtacgtcttcccgagcgaaaacggtctgcgctgcgggacgcgcgaattgaattatggcccacaccagtggcgcggcgacttccagttcaacatcagccgctacagtcaacagcaactgatggaaaccagccatcgccatctgctgcacgcggaagaaggcacatggctgaatatcgacggtttccatatggggattggtggcgacgactcctggagcccgtcagtatcggcggaattccagctgagcgccggtcgctaccattaccagttggtctggtgtcaaaaataataataaccgggcaggggggatccaattctgtgagcgtatggcaaacgaaggaaaaatagttatagtagccgcactcgatgggacatttcaacgtaaaccgtttaataatattttgaatcttattccattatctgaaatggtggtaaaactaactgctgtgtgtatgaaatgctttaaggaggcttccttttctaaacgattgggtgaggaaaccgagatagaaataataggaggtaatgatatgtatcaatcggtgtgtagaaagtgttacatcgactcataatattatattttttatctaaaaaactaaaaataaacattgattaaattttaatataatacttaaaaatggatgttgtgtcgttagataaaccgtttatgtattttgaggaaattgataatgagttagattacgaaccagaaagtgcaaatgaggtcgcaaaaaaactgccgtatcaaggacagttaaaactattactaggagaattattttttcttagtaagttacagcgacacggtatattagatggtgccaccgtagtgtatataggatctgctcccggtacacatatacgttatttgagagatcatttctataatttaggagtgatcatcaaatggatgctaattgacggccgccatcatgatcctattttaaatggattgcgtgatgtgactctagtgactcggttcgttgatgaggaatatctacgatccatcaaaaaacaactgcatccttctaagattattttaatttctgatgtgagatccaaacgaggaggaaatgaacctagtacggcggatttactaagtaattacgctctacaaaatgtcatgattagtattttaaaccccgtggcgtctagtcttaaatggagatgcccgtttccagatcaatggatcaaggacttttatatcccacacggtaataaaatgttacaaccttttgctccttcatattcagctgaaatgagattattaagtatttataccggtgagaacatgagactgactcgagttaccaaattagacgctgtaaattatgaaaaaaagatgtactaccttaataagatcgtccgtaacaaagtagttgttaactttgattatcctaatcaggaatatgactattttcacatgtactttatgctgaggaccgtgtactgcaataaaacatttcctactactaaagcaaaggtactatttctacaacaatctatatttcgtttcttaaatattccaacaacatcaactgaaaaagttagtcatgaaccaatacaacgtaaaatatctagcaaaaattctatgtctaaaaacagaaatagcaagagatccgtacgcggtaataaatagaaacgtactactgagatatactaccgatatagagtataatgatttagttactttaataaccgttagacataaaattgattctatgaaaactgtgtttcaggtatttaacgaatcatccataaattatactccggttgatgatgattatggagaaccaatcattataacatcgtatcttcaaaaaggtcataacaagtttcctgtaaattttctatacatagatgtggtaatatctgacttatttcctagctttgttagactagatactacagaaactaatatagttaatagtgtactacaaacaggcgatggtaaaaagactcttcgtcttcccaaaatgttagagacggaaatagttgtcaagattctctatcgccctaatataccattaaaaattgttagatttttccgcaataacatggtaactggagtagagatagccgatagatctgttatttcagtcgctgattaatcaattagtagagatgagataagaacattataataatcaataatatatcttatatcttatatcttatatcttatatcttgtttagaaaaatgctaatattaaaatagctaacgctagtaatccaatcggaagccatttgatatctataatagggtatctaatttcctgatttaaatagcggacagctatattctcggtagctactcgtttggaatcacaaacattatttacatctaatttactatctgtaatggaaacgtttcccaatgaaatggtacaatccgatacattgcattttgttatatttttttttaaagaggctggtaacaacgcatcgcttcgtttacatggctcgtaccaacaataatagggtaatcttgtatctattcctatccgtactatgcttttatcaggataaatacatttacatcgtatatcgtctttgttagcatcacagaatgcataaatttgttcgtccgtcatgataaaaatttaaagtgtaaatataactattatttttatagttgtaataaaaagggaaatttgattgtatactttcggttctttaaaagaaactgacttgataaaaatggctgtaatctctaaggttacgtatagtctatatgatcaaaaagagattaatgctacagatattatcattagtcatgttaaaaatgacgacgatatcggtaccgttaaagatggtagactaggtgctatggatggggcattatgtaagacttgtgggaaaacggaattggaatgtttcggtcactggggtaaagtaagtatttataaaactcatatagttaagcctgaatttatttcagaaattattcgtttactgaatcatatatgtattcactgcggattattgcgttcacgagaaccgtattccgacgatattaacctaaaagagttatcgggacacgctcttaggagattaaaggataaaatattatccaagaaaaagtcatgttggaacagtgaatgtatgcaaccgtatcaaaaaattactttttcaaagaaaaaggtttgtttcgtcaacaagttggatgatattaacgttcctaattctctcatctatcaaaagttaatttctattcatgaaaagttttggccattattagaaattcatcaatatccagctaacttattttatacagactactttcccatccctccgttgattattagaccggctattagtttttggatagatagtatacccaaagagaccaatgaattaacttacttattaggtatgatcgttaagaattgtaacttgaatgctgatgaacaggttatccagaaggcggtaatagaatacgatgatattaaaattatttctaataacactaccagtatcaatttatcatatattacatccggcaaaaataatatgattagaagttatatcgtcgcccgacgaaaagatcagaccgctagatctgtaattggtcccagtacatctatcaccgttaatgaggtaggaatgcccgcatatattagaaatacacttacagaaaagatatttgttaatgcctttacagtggataaagttaaacaactattagcgtcaaaccaagttaaattttactttaataaacgattaaaccaattaacaagaatacgccaaggaaagtttattaaaaataaaatacatttattgcctggtgattgggtagaagtagctgttcaagaatatacaagtattatttttggaagacagccgtctctacatagatacaacgtcatcgcttcatctatcagagctaccgaaggagatactatcaaaatatctcccggaattgccaactctcaaaatgctgatttcgacggggatgaggaatggatgatattagaacaaaatcctaaagctgtaattgaacaaagtattcttatgtatccgacgacgttactcaaacacgatattcatggagcccccgtttatggatctattcaagatgaaatcgtagcagcgtattcattgtttaggatacaagatctttgtttagatgaagtattgaacatcttggggaaatatggaagagagttcgatcctaaaggtaaatgtaaattcagcggtaaagatatctatacttacttgataggtgaaaagattaattatccgggtctcttaaaggatggtgaaattattgcaaacgacgtagatagtaattttgttgtggctatgaggcatctgtcattggctggactcttatccgatcataagtcgaacgtggaaggtatcaactttattatcaagtcatcttatgtttttaagagatatctatctatttacggttttggggtgacattcaaagatctgagaccaaattcgacgttcactaataaattggaggccatcaacgtagaaaaaatagaacttatcaaagaagcatacgccaaatatctcaacgatgtaagagacgggaaaatagttccattatctaaagctttagaggcggactatgtggaatccatgttatccaacttgacaaatcttaatatccgagagatagaagaacatatgagacaaacgctgatagatgatccagataataacctcctgaaaatggccaaagcgggttataaagtaaatcccacagaactaatgtatattctaggtacgtatggacaacaaaggattgatggtgaaccagcagagactcgagtattgggtagagttttaccttactatcttccagactctaaggatccagaaggaagaggttacattcttaattctttaacaaaaggattaacgggttctcaatattacttttcgatgctggttgccagatctcaatctactgatatcgtctgtgaaacatcacgtaccggaacactggctagaaaaatcattaaaaagatggaggatatggtggtcgacggatacggacaagtagttataggtaatacgctcatcaagtacgccgccaattataccaaaattctaggctcagtatgtaaacctgtagatcttatctatccagatgagtccatgacttggtatttggaaattagtgctctgtggaataaaataaaacagggattcgtttactctcagaaacagaaacttgcaaagaagacattggcgccgtttaatttcctagtattcgtcaaacccaccactgaggataatgctattaaggttaaggatctgtacgatatgattcataacgtcattgatgatgtgagagagaaatacttctttacggtatctaatatagattttatggagtatatattcttgacgcatcttaatccttctagaattagaattacaaaagaaacggctatcactatctttgaaaagttctatgaaaaactcaattatactctaggtggtggaactcctattggaattatttctgcacaggtattgtctgagaagtttacacaacaagccctgtccagttttcacactactgaaaaaagtggtgccgtcaaacaaaaacttggtttcaacgagtttaataacttgactaatttgagtaagaataagaccgaaattatcactctggtatccgatgatatctctaaacttcaatctgttaagattaatttcgaatttgtatgtttgggagaattaaatccaaacatcactcttcgaaaagaaacagataaatatgtagtagatataatagtcaatagattatacatcaagagagcagaaataaccgaattagtcgtcgaatatatgattgaacgatttatctcctttagcgtcattgtaaaggaatggggtatggagacattcattgaggacgaggataatattagatttactgtctacctaaatttcgttgaaccggaagaattgaatcttagtaagtttatgatggttcttccgggggcagccaacaagggaaagattagtaaattcaagattcctatctctgattatacgggatatgacgacttcaatcaaacaaaaaagctcaataagatgactgtagaactcatgaatctaaaagaattgggttctttcgatttggaaaacgtcaacgtgtatcctggagtatggaatacatacgatatcttcggtatcgaggccgctcgtgaatacttgtgcgaagccatgttaaacacctatggagaagggttcgattatctgtatcagccttgtgatcttctcgctagtttactatgtgctagttacgaaccagaatcagtgaataaattcaagttcggcgcagctagtactcttaagagagctacgttcggagacaataaagcattgttaaacgcggctcttcataaaaagtcagaacctattaacgataatagtagctgccacttttttagcaaggtccctaatataggaactggatattacaaatactttatcgacttgggtcttctcatgagaatggaaaggaaactatctgataagatatcttctcaaaagatcaaggaaatggaagaaacagaagacttttaattcttatcaataacatatttttctatgatctgtcttttaaacgatggattttccacaaatgcgcctctcaagtccctcatagaatgatacacgtataaaaaatatagcataggcaatgactccttatttttagacattagatatgccaaaatcatagccccgcttctatttactcccgcagcacaatgaaccaacacgggctcgtttcgttgatcacatttagataaaaaggcggttacgtcgtcaaaatatttactaatatcggtagttgtatcatctaccaacggtatatgaataatattaatattagagttaggtaatgtatatttatccatcgtcaaatttaaaacatatttgaacttaacttcagatgatggtgcatccatagcatttttataatttcccaaatacacattattggttacccttgtcattatagtgggagatttggctttgtgcatatctccagttgaacgtagtagtaagtatttatacaaacttttcttatccatttataacgtacaaatggataaaactactttatcggtaaacgcgtgtaatttagaatacgttagagaaaaggctatagtaggcgtacaagcagccaaaacatcaacacttatattctttgttattatattggcaattagtgcgctattactctggtttcagacgtctgataatccagtctttaatgaattaacgagatatatgcgaattaaaaatacggttaacgattggaaatcattaacggatagcaaaacaaaattagaaagtgatagaggtagacttctagccgctggtaaggatgatatatttgaattcaaatgtgtggatttcggcgcctattttatagctatgcgattggataagaaaacatatctgccgcaagctattaggcgaggtactggagacgcgtggatggttaaaaaggcggcaaaggtcgatccatctgctcaacaattttgtcagtatttgataaaacacaagtctaataatgttattacttgtggtaatgagatgttaaatgaattaggttatagcggttattttatgtcaccgcattggtgttccgattttagtaatatggaatagtgttagataaatgcggtaacgaatgttcctgtaaggaaccataacagcttagatttaacgttaaagatgagcataaacataataaacaaaattacaatcaaacttataacattaatatcaaacaatccaaaaaatgaaatcagtggagtagtaaacgcgtacataactcctggataacgtttagcagctgccgttcctattctagaccaaaaattcggtttcatgttttcgaaacggtattctgcaacaagtcgaggatcgtgttctacatatttggcggcattatccagtatctgcctattgatcttcatttcgttttcgattctggctatttcaaaataaaatcccgatgatagacctccagactttataatttcatctacgatgttcagcgccgtagtaactctaataatataggctgataagctaacatcataccctcctgtatatgtgaatatggcatgatttttgtccattacaagctcggttttaactttattgcctgtaataatttctctcatctgtaggatatctatttttttgtcatgcattgccttcaagacgggacgaagaaacgtaatatcctcaataacgttatcgttttctacaataactacatattctacctttttattttctaactcggtaaaaaaattagaatcccatagggctaaatgtctagcgatatttcttttcgtttcctctgtacacatagtgttacaaaaccctgaaaagaagtgagtatacttgtcatcatttctaatgtttcctccagtccactgtataaacgcataatccttgtaatgatctggatcatccttgactaccacaacatttcttttttctggcataacttcgttgtcctttacatcatcgaacttctgatcattaatatgctcatgaacattaggaaatgtttctgatggaggtctatcaataactggcacaacaataacaggagttttcaccgccgccatttagttattgaaattaatcatatacaactctttaatacgagttatattttcgtctatccattgtttcacattgacatatttcgacaaaaagatataaaatgcgtattccaatgcttctctgtttaatgaattactaaaatatacaaacacgtcactgtctggcaataaatgatatcttagaatattgtaacaatttattttgtattgcacatgttcgtgatctatgagttcttcttcgaatggcataggatctccgaatctgaaaacgtataaataggagttagaataataatatttgagagtattggtaatatataaactctttagcggtataattagtttttttctctcaatttctatttttagatgtgatggaaaaatgactaattttgtagcattagtatcatgaactctaatcaaaatcttaatatcttcgtcacacgttagctctttgaagtttttaagagatgcatcagttggttctacagatggagtaggtgcaacaattttttgttctacacatgtatgtactggagccattgttttaactataatggtgcttgtatcgaaaaactttaatgcagatagcggaagctcttcgccgcgactttctacgtcgtaattgggttctaacgccgatctctgaatggatactagttttctaagttctaatgtgattctctgaaaatgtaaatccaattcctccggcattatagatgtgtatacatcggtaaataaaactatagtatccaacgatcccttctcgcaaattctagtcttaaccaaaaaatcgtatataaccacggagatggcgtatttaagagtggattcttctaccgttttgttcttggatgtcatataggaaactataaagtccgcactactgttaagaatgattactaacgcaactatatagtttaaattaagcattttggaaacataaaataactctgtagacgatacttgactttcgaataagtttgcagacaaacgaagaaagaacagacctctcttaatttcagaagaaaactttttttcgtattcctgacgtctagagtttatatcaataagaaagttaagaattagtcggttaatgttgtatttcattacccaagtttgagatttcataatattatcaaaagacatgataatattaaagataaagcgctgactatgaacgaaatagctatatggttcgctcaagaatatagtcttgttaaacgtggaaacgataactgtatttttaatcacgtcagcggcatctaaattaaatataggtatatttattccacacactctacaatatgccacaccatcttcataataaataaattcgttagcaaaattattaattttagtgaaatagttagcgtcaactttcatagcttccttcaatctaatttgatgctcacacggtgcgaattccactctaacatcccttttccatgcctcaggttcatcgatctctataatatctagttttttgcgtttcacaaacacaggctcgtctctcgcgatgagatctgtatagtaactatgtaaatgataactagatagaaagatgtagctatatagatgacgatcctttaagagaggtataataactttaccccaatcagatagactgttgttatggtcttcggaaaaagaatttttataaatttttccagtattttccaaatatacgtacttaacatctaaaaaatccttaatgataataggaatggataatccgtctattttataaagaaatacatatcgcacattatacttttttttggaaatgggaataccgatgtgtctacataaatatgcaaagtctaaatattttttagagaatcttagttggtccaaattcttttccaagtacggtaatagatttttcatattgaacggtatcttcttaatctctggttctagttccgcattaaatgatgaaactaagtcactatttttataactaacgattacatcacctctaacatcatcatttaccagaatactgatcttcttttgtcgtaaatacatgtctaatgtgttaaaaaaaagatcatacaagttatacgtcatttcatctgtggtattcttgtcattgaaggataaactcgtactaatctcttctttaacagcctgttcaaatttatatcctatatacgaaaaaatagcaaccagtgtttgatcatccgcgtcaatattctgttctatcgtagtgtataacaatcgtatatcttcttctgtgatagtcgatacgttataaaggttgataacgaaaatatttttatttcgtgaaataaagtcatcgtaggattttggacttatattcgcgtctagtagatatgcttttatttttggaatgatctcaattagaatagtctctttagagtccatttaaagttacaaacaactaggaaattggtttatgatgtataatttttttagtttttatagattctttattctatacttaaaaaatgaaaataaatacaaaggttcttgagggttgtgttaaattgaaagcgagaaataatcataaattatttcattatcgcgatatccgttaagtttgtatcgtaatggcgtggtcaattacgaataaagcggatactagtagcttcacaaagatggctgaaatcagagctcatctaaaaaatagcgctgaaaataaagataaaaacgaggatattttcccggaagatgtaataattccatctactaagcccaaaaccaaacgagccactactcctcgtaaaccagcggctactaaaagatcaaccaaaaaggaggaagtggaagaagaagtagttatagaggaatatcatcaaacaactgaaaaaaattctccatctcctggagtcagcgacattgtagaaagcgtggccgctgtagagctcgatgatagcgacggggatgatgaacctatggtacaagttgaagctggtaaagtaaatcatagtgctagaagcgatctctctgacctaaaggtggctaccgacaatatcgttaaagatcttaagaaaattattactagaatctctgcagtatcgacggttctagaggatgttcaagcagctggtatctctagacaatttacttctatgactaaagctattacaacactatctgatctagtcaccgagggaaaatctaaagttgttcgtaaaaaagttaaaacttgtaagaagtaaatgcgtgcacttttttataaagatggtaaactctttaccgataataattttttaaatcctgtatcagacgataatccagcgtatgaggttttgcaacatgttaaaattcctactcatttaacagatgtagtagtatatgaacaaacgtgggaggaggcgttaactagattaatttttgtgggaagtgattcaaaaggacgtagacaatacttttacggaaaaatgcatgtacagaatcgcaacgctaaaagagatcgtatttttgttagagtatataacgttatgaaacgaattaattgttttataaacaaaaatataaagaaatcgtccacagattccaattatcagttggcggtttttatgttaatggaaactatgttttttattagatttggtaaaatgaaatatcttaaggagaatgaaacagtagggttattaacactaaaaaataaacacatagaaataagtcccgatgaaatagttatcaagtttgtaggaaaggacaaagtttcacatgaatttgttgttcataagtctaatagactatataaaccgctattgaaactgacggatgattctagtcccgaagaatttctgttcaacaaactaagtgaacgaaaggtatacgaatgtatcaaacagtttggtattagaatcaaggatctccgaacgtatggagtcaattatacgtttttatataatttttggacaaatgtaaagtccatatctcctcttccgtcaccaaaaaagttaatagcattaactatcaaacaaactgctgaagtggtaggtcatactccatcaatttcaaaaagagcttatatggcaacgactattttagaaatggtaaaggataaaaattttttagatgtagtatctaaaactacgttcgatgaattcctatctatagtcgtagatcacgttaaatcatctacggatggatgatatagatctttacacaaataattacaagaccgataaatggaaatggataagcgtatgaaatctctcgcaatgacagctttcttcggagagctaagcacattagatattatggcattgataatgtctatatttaaacgccatccaaacaataccattttttcagtggataaggatggtcagtttatgattgatttcgaatacgataattataaggcttctcaatatttggatctgaccctcactccgatatctggagatgaatgcaagactcacgcatcgagtatagccgaacaattggcgtgtgcggatattattaaagaggatattagcgaatatatcaaaactactccccgtcttaaacgatttataaaaaaataccgcaatagatcagatactcgtatcagtcgagatacagaaaagcttaaaatagctctagctaaaggcatagattacgaatatataaaagacgcttgttaataagtaaatgaaaaaaaactagtcgtttataataaaacacgatatggatgccaacgtagtatcattttctactattgcgacgtatatagacgctttagcgaagaatgcttcggaattagaacagaggtctaccgcatacgaaataaataatgaattggaactagtatttattaagccgccattgattactttgacaaatgtagtgaatatctctacgattcaggaatcgtttattcgatttaccgttactaataaggaaggtgttaaaattagaactaagattccattatctaaggtacatggtctagatgtaaaaaatgtacagttagtagatgctatagataacatagtttgggaaaagaaatcattagtgacggaaaatcgtcttcacaaagaatgcttgttgagactatcgacagaggaacgtcatatatttttggattacaagaaatatggatcctctatccgactagaattagtcaatcttattcaagcaaaaacaaaaaactttacgatagactttaagctaaaatattttctaggatccggtgcccagtctaaaagttctttgttgcacgctattaatcatccaaagtcaaggcctaatacatctctggaaatagaattcacacctagagacaatgaaacagttccatatgatgaactaataaaggaattgacgactctctcgcgtcatatatttatggcttctccagagaatgtaattctttctccgcctattaacgcgcctataaaaacctttatgttgcctaaacaagatatagtaggtttggatctggaaaatctatatgccgtaactaagactgacggcattcctataactatcagagttacatcaaacgggttgtattgttattttacacatcttggttatattattagatatcctgttaagagaataatagattccgaagtagtagtctttggtgaggcagttaaggataagaactggaccgtatatctcattaagctaatagagcctgtgaatgcaatcaatgatagactagaagaaagtaagtatgttgaatctaaactagtggatatttgtgatcggatagtattcaagtcaaagaaatacgaaggtccgtttactacaactagtgaagtcgtcgatatgttatctacatatttaccaaagcaaccagaaggtgttattctgttctattcaaagggacctaaatctaacattgattttaaaattaaaaaggaaaatactatagaccaaactgcaaatgtagtatttaggtacatgtccagtgaaccaattatctttggagaatcgtctatctttgtagagtataagaaatttagcaacgataaaggctttcctaaagaatatggttctggtaagattgtgttatataacggcgttaattatctaaataatatctattgtttggaatatattaatacacataatgaagtgggtattaagtccgtggttgtacctattaagtttatagcagaattcttagttaatggagaaatacttaaacctagaattgataaaaccatgaaatatattaactcagaagattattatggaaatcaacataatatcatagtcgaacatttaagagatcaaagcatcaaaataggagatatctttaacgaggataaactatcggatgtgggacatcaatacgccaataatgataaatttagattaaatccagaagttagttattttacgaataaacgaactagaggaccgttgggaattttatcaaactacgtcaagactcttcttatttctatgtattgttccaaaacatttttagacgattccaacaaacgaaaggtattggcgattgattttggaaacggtgctgacctggaaaaatacttttatggagagattgcgttattggtagcgacggatccggatgctgatgctatagctagaggaaatgaaagatacaacaaattaaactctggaattaaaaccaagtactacaaatttgactacattcaggaaactattcgatccgatacatttgtctctagtgtcagagaagtattctattttggaaagtttaatatcatcgactggcagtttgctatccattattcttttcatccgagacattatgctaccgtcatgaataacttatccgaactaactgcttctggaggcaaggtattaatcactaccatggacggagacaaattatcaaaattaacagataaaaagacttttataattcataagaatttacctagtagcgaaaactatatgtctgtagaaaaaatagctgatgatagaatagtggtatataatccatcaacaatgtctactccaatgactgaatacattatcaaaaagaacgatatagtcagagtgtttaacgaatacggatttgttcttgtagataacgttgatttcgctacaattatagaacgaagtaaaaagtttattaatggcgcatctacaatggaagatagaccgtctacaaaaaactttttcgaactaaatagaggagccattaaatgtgaaggtttagatgtcgaagacttacttagttactatgttgtttatgtcttttctaagcggtaaataataatatggtatgggttctgatctcccagttctaaatgcattaaataattccaatagagcgatttttgttcctataggaccttccaactgtggatactctgtattgttaatagatatattaatacttttgtcgggtaacagaggttctacgtcttctaaaaataaaagttttataacatctggcctgttcataaataaaaacttggcgattctatatatactcttattatcaaatctagccattgtcttatagatgtgagctactgtaggtgtaccatttgattttctttctaatactatatatttctctcgaagaagttcttgcacatcatctgggaataaaatactactgttgagtaaatcagttattttttttatatcgatattgatggacatttttatagttaaggataataagtatcccaaagtcgataacgacgataacgaagtatttatacttttaggaaatcacaatgactttatcagattaaaattaacaaaattaaaggagcatgtatttttttctgaatatattgtgactccagatacatatggatctttatgcgtcgaattaaatgggtctagttttcagcacggcggtagatatatagaggtggaggaatttatagatgctggaagacaagttagatggtgttctacatccaatcatatatctaaagatatacccgaagatatgcacactgataaatttgtcatttatgatatttatacgtttgattcgttcaagaataaacgattggtattcgtacaggtacctccgtcgttaggagatgatagtcatttgactaatccgttattgtcaccgtattatcgtaattcagtagccagacaaatggtcaatgatatgatttttaatcaagattcatttttaaaatatttattagaacatctgattagaagccactatagagtttctaaacatataacaatagttagatacaaggataccgaagaattaaatctaacgagaatatgttataatagagataagtttaaggcgtttgtattcgcttggtttaacggcgtttcggaaaatgaaaaggtactagatacgtataaaaaggtatctaatttgatataatgaattcagtgactgtatcacacgcgccatatactattacttatcacgatgattgggaaccagtaatgagtcaattggtagagttttataacgaagtagccagttggctgctacgagacgagacgtcgcctattcctgataagttctttatacagttgaaacaaccgcttagaaataaacgagtatgtgtgtgtggtatagatccgtatccgaaagatggaactggtgtaccgttcgaatcaccaaattttacaaaaaaatcaattaaggagatagcttcatctatatctagattaaccggagtaattgattataaaggttataaccttaatataatagacggggttataccctggaattattacttaagttgtaaattaggagaaacaaaaagtcacgcgatttactgggataagatttccaagttactgctgcagcatataactaaacacgttagtgttctttattgtttgggtaaaacagatttctcgaatatacgggccaagttagaatccccggtaactaccatagtcggatatcatccagcggctagagaccgccaattcgagaaagatagatcatttgaaattatcaacgttttactggaattagacaacaaggcacctataaattgggctcaagggtttatttattaatgctttagtgaaattttaacttgtgttctaaatggatgcggctattagaggtaatgatgttatctttgttcttaagactataggtgtcccgtcagcgtgcagacaaaatgaagatccaagatttgtagaagcatttaaatgcgacgagttagaaagatatattgagaataatccagaatgtacactattcgaaagtcttagggatgaggaagcatactctatagtcagaattttcatggatgtagatttagacgcgtgtctagacgaaatagattatttaacggccattcaagattttattatcgaggtgtcaaactgtgtagctagattcgcgtttacagaatgcggcgccattcatgaaaatgtaataaaatccatgagatctaatttttcattgactaagtctacaaatagagataaaacaagttttcatattatctttttagatacgtataccactatggatacattgatagctatgaaacgaacactattagaattaagtagatcatctgaaaatccactaaccagatcgatagacactgccgtatataggagaaaaacaactcttcgggttgtaggtactaggaaaaatccaaattgcgacactattcatgtaatgcaaccaccgcatgataatatagaagattacctattcacttacgtggatatgaacaacaatagttattacttttctctacaacaacgattggaggatttagttcctgataagttatgggaaccagggtttatttcattcgaagacgctataaaaagagtttcaaaaatattcattaattctataataaactttaatgatctcgatgaaaataattttacaacggtaccactggtcatagattacgtaacaccttgtgcattatgtaaaaaacgatcgcataaacatccgcatcaactatcgttggaaaatggtgctattagaatttacaaaactggtaatccacatagttgtaaagttaaaattgttccgttggatggtaataaactgtttaatattgcacaaagaattttagacactaactctgttttattaaccgaacgaggagaccatatagtttggattaataattcatggaaatttaacagcgaagaacccttgataacaaaactaattttgtcaataagacatcaactacctaaggaatattcaagcgaattactctgtccaagaaaacgaaagactgtagaagctaacatacgagacatgttagtagattcagtggagaccgatacctatccggataaacttccgtttaaaaatggtgtattggacctggtagacggaatgttttactctggagatgatgctaaaaaatatacgtgtactgtatcaaccggatttaaatttgacgatacaaagttcgtcgaagacagtccagaaatggaagagttaatgaatatcattaacgatatccaaccattaacggatgaaaataagaaaaatagagagctatatgaaaaaacattatctagttgtttatgcggtgctaccaaaggatgtttaacattcttttttggagaaactgcaactggaaagtcgacaaccaaacgtttgttaaagtctgctatcggtgacctgtttgttgagacgggtcaaacaattttaacagatgtattggataaaggacctaatccatttatcgctaacatgcatttgaaaagatctgtattctgtagcgaactacctgattttgcctgtagtggatcaaagaaaattagatctgacaatattaaaaagttgacagaaccttgtgtcattggaagaccgtgtttctccaataaaattaataatagaaaccatgcgacaatcattatcgatactaattacaaacctgtttttgataggatagataacgcattaatgagaagaattgccgtcgtgcgattcagaacacacttttctcaaccttctggtagagaggctgctgaaaataatgacgcgtacgataaagtcaaactattagacgaggggttagatggtaaaatacaaaataatatatatagatttgcatttctatacttgttggtgaaatggtacaaaaaatatcatgttcctattatgaaactatatcctacacccgaagagattcctgactttgcattctatctcaaaataggtactctgttggtatctagctctgtaaagcatattccattaatgacggacctctccaaaaagggatatatattgtacgataatgtggtcactcttccgttgactactttccaacagaaaatatccaagtattttaattctagactatttggacacgatatagagagcttcatcaatagacataagaaatttgccaatgttagtgatgaatatctgcaatatatattcatagaggatatttcatctccgtaaatatatgctcatatatttatagaagatatcacatatctaaatgaataccggaatcatagatttatttgataatcatgttgatagtataccaactatattacctcatcagttagctactctagattatctagttagaactatcatagatgagaacagaagcgtgttattgttccatattatgggatcaggtaaaacaataatcgctttgttgttcgccttggtagcttccagatttaaaaaggtttacattctagtgccgaacatcaacatcttaaaaattttcaattataatatgggtgtagctatgaacttgtttaatgacgaattcatagctgagaatatctttattcattccacaacaagtttttattctcttaattataacgataacgtcattaattataacggattatctcgctacaataactctatttttatcgttgatgaggcacataatatctttgggaataatactggagaacttatgaccgtgataaaaaataaaaacaagattccttttttactattgtctggatctcccattactaacacacctaatactctgggtcatattatagatttaatgtccgaagagacgatagattttggtgaaattattagtcgtggtaagaaagtaattcagacacttcttaacgaacgcggtgtgaatgtacttaaggatttgcttaaaggaagaatatcatattacgaaatgcctgataaagatctaccaacgataagatatcacggacgtaagtttctagatactagagtagtatattgtcacatgtctaaacttcaagagagagattatatgattactagacgacagctatgttatcatgaaatgtttgataaaaatatgtataacgtgtcaatggcagtattgggacaacttaatctgatgaataatttagatactttatttcaggaacaggataaggaattgtacccaaatctgaaaataaataatggcgtgttatacggagaagaattggtaacgttaaacattagttccaaatttaaatactttattaatcggatacagacactcaacggaaaacattttatatacttttctaattctacatatggcggattggtaattaaatatatcatgctcagtaatggatattctgaatataatggttctcagggaactaatccacatatgataaacggcaaaccaaaaacatttgctatcgttactagtaaaatgaaatcgtctttagaggatctattagatgtgtataattctcctgaaaacgatgatggtagtcaattgatgtttttgttttcatcaaacattatgtccgaatcctatactctaaaagaggtaaggcatatttggtttatgactatcccagatactttttctcaatacaaccaaattcttggacgatctattagaaaattctcttacgccgatatttctgaaccagttaatgtatatcttttagccgccgtatattccgatttcaatgacgaagtgacgtcattaaacgattacacacaggatgaattaattaatgttttaccatttgacatcaaaaagctgttgtatctaaaatttaagacgaaagaaacgaatagaatatactctattcttcaagagatgtctgaaacgtattctcttccaccacatccatcaattgtaaaagttttattgggagaattggtcagacaatttttttataataattctcgtattaagtataacgataccaagttacttaaaatggttacatcagttataaaaaataaagaagacgctaggaattacatagatgatattgtaaacggtcacttctttgtatcgaataaagtatttgataaatctcttttatacaaatacgaaaacgatattattacagtaccgtttagactttcctacgaaccatttgtttggggagttaactttcgtaaagaatataacgtggtatcttctccataaaactgatgagatatataaagaaataaatgtcgagctttgttaccaatggatacctttccgttacattggaaccacacgagctgacgttagacataaaaactaatattaggaatgccgtatataagacgtatctccatagagaaattagtggtaaaatggccaagaaaatagaaattcgtgaagacgtggaattacctctcggcgaaatagttaataattctgtagttataaacgttccgtgtgtaataacctacgcgtattatcacgttggggatatagtcagaggaacattaaacatcgaagatgaatcaaatgtaactattcaatgtggagatttaatctgtaaactaagtagagattcgggtactgtatcatttagcgattcaaagtactgcttttttcgaaatggtaatgcgtatgacaatggcagcgaagtcactgccgttctaatggaggctcaacaaggtatcgaatctagttttgtttttctcgcgaatatcgtcgactcataaaaaagagaatagcggtaagtataaacacgaatactatggcaataattgcgaatgttttattctcttcgatatatttttgataatatgaaaaacatgtctctctcaaatcggacaaccatctcataaaatagttctcgcgcgctggagaggtagttgccgctcgtataatctctccagaataatatacttgcgtgtcgtcgttcaatttatacggatttctatagttctctgttatataatgcggtttgccctcatgattagacgacgacaatagtgttctaaatttagatagttgatcagaatgaatgtttattggcgttggaaaaattatccatacagcgtctgcagagtggttgatagttgttcctagatatgtaaaataatccaacttactaggcagcaaattgtctagataaaatactgaatcaaacggtgcagacgtattggcggatctaatggaatccaattgattaactatcttttgaaaatatacatttttatgatccaatacttgtaagaatatagaaataatgataagtccatcatcgtgtttttttgcctcttcataagaactatattttttcttattccaatgaacaagattaatctctccagagtatttgtacacatctatcaagtgattggatccataatcgtcttcctttccccaatatatatgtagtgatgataacacatattcattggggagaaaccctccacttatatatcctcctttaaaattaatccttactagttttccagtgttctggatagtggttggtttcgactcattataatgtatgtctaacggcttcaatcgcgcgttagaaattgcttttttagtttctatattaataggagatagttgttgcggcatagtaaaaatgaaatgataactgtttaaaaatagctcttagtatgggaattacaatggatgaggaagtgatatttgaaactcctagagaattaatatctattaaacgaataaaagatattccaagatcaaaagacacgcatgtgtttgctgcgtgtataacaagtgacggatatccgttaataggagctagaagaacttcattcgcgttccaggcgatattatctcaacaaaattcagattctatctttagagtatccactaaactattacggtttatgtactacaatgaactaagagaaatctttagacggttgagaaaaggttctatcaacaatatcgatcctcactttgaagagttaatattattgggtggtaaactagataaaaaggaatctattaaagattgtttaagaagagaattaaaagaggaaagtgatgaacgtataacagtaaaagaatttggaaatgtaattctaaaacttacaacacgggataaattatttaataaagtatatataagttattgcatggcgtgttttattaatcaatcgttggaggatttatcgcatactagtatttacaatgtagaaattagaaagattaaatcattaaatgattgtattaacgacgataaatacgaatatctgtcttatatttataatatgctagttaatagtaaatgaacttttacagatctagtataattagtcagattattaagtataatagacgactagctaagtctattatttgcgaggatgactctcaaattattacactcacggcattcgttaaccaatgcctatggtgtcataaacgagtatccgtgtccgctattttattaactactgataacaaaatattagtatgtaacagacgagatagttttctctattctgaaataattagaactagaaacatgtttagaaagaaacgattatttctgaattattccaattatttgaacaaacaggaaagaagtatactatcgtcatttttttctctagatccagctactactgataatgatagaatagacgctatttatccgggtggcatacccaaaaggggtgagaatgttccagagtgtttatccagggaaattaaagaagaagttaatatagacaattcttttgtattcatagacactcggttttttattcatggcatcatagaagataccattattaataaattttttgaggtaatcttctttgtcggaagaatatctctaacgagtgatcaaatcattgatacatttaaaagtaatcatgaaatcaaggatctaatatttttagatccgaattcaggtaatggactccaatacgaaattgcaaaatatgctctagatactgcaaaacttaaatgttacggccatagaggatgttattatgaatcattaaaaaaattaactgaggatgattgattaaaaaatataaattaatttaccatcgtgtatttttataacgggattgtccggcatatcatgtagatagttaccgtctacatcgtatactcgaccatctacgcctttaaatcctctatttattgacattaatctattagaattggaataccaaatattagtaccctcaattagtttattggtaatattttttttagacgatagatcgatggctcttgaaaccaaggttttccaaccggactcattgtcgatcggtgagaagtctttttcattagcatgaatccattctaatgatgtatgtttaaacactctaaacaattggacaaattcttttgatttgctttgaatgatttcaaataggtcttcgtctacagtaggcataccattagataatctagccattataaagtgcacgtttacatatctacgttctggaggagtaagaacgtgactattgagacgaatggctcttcctactatctgacgaagagacgcctcgttccatgtcatatctaaaatgaagatatcattaattgagaaaaaactaataccctcgcctccactagaagagaatacgcatgttttaatgcattctccgttagtgtttgattcttggttaaactcagccaccgccttgattctagtatcttttgttctagatgagaactctatattagagataccaaagactttgaaatatagtaataagatttctattcctgactgattaacaaatggttcaaagactagacatttaccatgggatgctaatattcccaaacatacatctataaatttgacgcttttctcttttaattcagtaaatagagagatatcagccgcactagcatcccctttcaatagttctccctttttaaaggtatctaatgcggatttagaaaactctctatctcttaatgaatttttaaaatcattatatagtgttgctatctcttgcgcgtattcgcccggatcacgattttgtctttcaggaaagctatcgaacgtaaacgtagtagccatacgtctcagaattctaaatgatgatatacctgtttttatttcagcgagtttagccttttgataaatttcttcttgctttttcgacatattaacgtatcgcattaatactgttttcttagcgaatgatgcagacccttctacgtcatcaaaaatagaaaactcgttattaactatatacgaacatagtcctcctagtttggagactaattctttttcatcgactagacgtttattctcaaatagcgattggtgttgtaaggatcctggtcgtagtaagttaaccaacatggtgaattcttgcacactattgacgataggtgtagccgataaacaaatcatcttatggttttttaacgcaatggtcttagataaaaaattatatactgaacgagtaggacggatcttaccatcttctttgattaatgatttagaaatgaagttatgacattcatcaataatgacgcatattctactcttggaattaatagttttgatattagtaaaaaatttatttctaaaattttgatcatcgtaattaataaaaatacaatccttcgttatctctggagcgtatctgagtatagtgttcatccaaggatcttctatcaaagcctttttcaccaataagataatagcccaattcgtataaatatccttaagatgtttgagaatatatacagtagtcattgttttaccgacacccgtttcatggaacaataaaagagaatgcatactgtctaatcctaagaaaactcttgctacaaaatgttgataatccttgaggcgtactacgtccgaccccatcatttcaacgggcatattagtagttctgcgtaaggcataatcgatataggccgcgtgtgatttactcatttatgagtgataagtaataactatgttttaaaaatcacagcagtagtttaactagtcttctctgatgtttgttttcgatactttttgaatcagaagtcatactagaataaagcaacgagtgaacgtaatagagagcttcgtatactctattcgaaaactctaagaacttattaatgaattccgtatccactggattgtttaaaatactaaattgaacactgttcacatccttccaagaagaagacttagtgacggacttaacatgagacataaataaatccaaattttttttacaaacatcactagccaccataatggcgctatctttcaaccagctatcgcttacgcattttagcagtctaacatttttaaagagactacaatatattctcatagtatcgattacacctctaccgaataaagttggaagtttaataatacaatatttttcgtttacaaaatcaaataatggtcgaaacacgtcgaaggttaacatcttataatcgctaatgtatagattgttttcagtgagatgattattagatttaatagcatctcgttcacgtttgaacagtttattgcgtgcgctgaggtcggcaactacggcgtccgctttagtactcctcccataatactttacgctattaatctttaaaatttcatagactttatctagatcgctttctggtaacatgatatcatgtgtaaaaagttttaacatgtcggtcggcattctatttagatcattaactctagaaatctgaagaaagtaattagctccgtattccagactaggtaatgggcttttacctagagacagattaagttctggcaatgtttcataaaatggaagaaggacatgcgttccctcccggatattttttacaatttcatccatttacaactctatagtttgttttcattattattagttattatctcccataatcttggtaatacttaccccttgatcgtaagataccttatacaggtcattacatacaactaccaattgtttttgtacataatagattggatggttgacatccatggtggaataaactactcgaacagatagtttatctttccccctagatacattagccgtaatagttgtcggcctaaagaatatctttggtgtaaagttaaaagttagggttcttgttccattattgctttttgtcagtagttcattataaattctcgagatgggtccgttctctgaatatagaacatcatttccaaatctaacttctagtctagaaataatatcggtcttattcttaaaatctattcccttgatgaagggatcgttaatgaacaaatccttggcctttgattcggctgatctattatctccgttatagacgttacgttgactagtccaaagacttacaggaatagatgtatcgatgatgttgatactatgtgatatgtgagcaaagattgttctcttagtggcatcactatatgttccagtaatggcggaaaactttttagaaatgttatatataaaagaattttttcgtgttccaaacattagcagattagtatgaagataaacactcatattatcaggaacattatcaatttttacatacacatcagcatcttgaatagaaacgataccatcttctggaacctctacgatctcggcagactccggataaccagtcggtgggccatcgctaacaataactagatcatccaacaatctactcacatatgcatctatataatctttttcatcttgtgagtaccctggatacgaaataaatttattatccgtatttccataataaggtttagtataaacagagagagatgttgccgcatgaacttcagttacagtcgccgttggttggtttatttgacctattactctcctaggtttctctataaacgatggtttaatttgtacattcttaaccatatatccaataaagctcaattcaggaacataaacaaattctttgttgaacgtttcaaagtcgaacgaagagtcacgaataacgatatcggatactggattgaaggttaccgttacggtaatttttgaatcggatagtttaagactgctgaatgtatcttccacatcaaacggagttttaatataaacgtatactgtagatggttctttaatagtgtcattaggagttaggccaatagaaatatcattaagttcactagaatatccagagtgtttcaaagcaattgtattattgatacaattattatataattcttcgccctcaatttcccaaataacaccgttacacgaagagatagatacgtgattaatacatttatatccaacatatggtacgtaactgaatcttcccatacctttaacttctggaagttccaaactcagaaccaaatgattaagcgcagtaatatactgatccctaatttcgaagctagcgatagcctgattgtctggaccatcgtttgtcataactccggatagagaaatatattgcggcatatacaaagttggaatttgactatcgactgcgaagacattagaccgtttaatagagtcatccccaccgatcaaagaattaatgatagtattattcattttctatttaaaatggaaaaagcttacaataaactccgtagagaaatatctataatttgtgagttttccttaaagtaacagcttccgtaaacgccgtctttatctcttagtaggtttattgtatttatgaccttttccttatcttcatagaatactaaaggcaacaaagaaatttttggttcttctctaagagctacgtgagacttaaccatagaagccaacgaatccctacatattttagaacagaaataccctacttcaccacccttgtatgtctcaatactaataggtctaaaaaccaaatcttgattacaaaaccaacacttatcaattacactatttgtcttaatagacacatctgccatagatttataatactttggtagtatacaagcgagtgcttcttctttagcgggcttaaagactgctttaggtgctgaaataaccacatctggaaggcttactcgcttagccatttaattacggaactatttttttatacttctaatgagcaagtagaaaacctctcatctacaaaaacgtactcgtgtccataatcctctaccatagttacacgttttttagatctcatatgtgctaaaaagttttcccatactaattggttactattatttttcgtataatttttaacagtttgaggttttagatttttagttacagaagtgatatcgaatattttatccaaaaagaatgaataattaattgtcttagaaggagtgttttcttggcaaaagaataccaagtgcttaaatatttctactacttcattaatcttttctgtactcagattcagtttctcatcttttacttgattgattatttcaaagactaacttataatcctttttatttattctctcgttagccttaagaaaactagatacaaaatttgcatctacatcatccgtggatatttgatttttttccatgatatccaagagttccgagataatttctccagaacattgatgagacaataatctccgcaatacatttctcaaatgaataagtttattagacacgtggaagtttgactttttttgtacctttgtacatttttgaaataccgactcgcaaaaaatacaatattcatatccttgttcagatactataccgttatgtctacaaccgctacataatcgtagattcatgttaacactctacgtatctcgtcgtccaatattttatataaaaacattttatttctagacgttgccagaaaatcctgtaatatttttagttttttgggctgtgaataaagtatcgccctaatattgttaccgtcttccgccaatatagtagttaaattatccgcacatgcagaagaacaccgcttaggcggattcagtacaatgttatatttttcgtaccaactcatttaaatatcataatctaaaatagttctgtaatatgtctagcgctaatatattgatcataatcctgtgcataaattaagatacaacaatgtctcgaaatcatcgacatggcttcttccatagttagaagatcgtcgtcaaagttagcaacgtgattcatcaacatttgctgttttgaggcagcaaatactgaaccgtcgccattcaaccattcataaaaaccatcgtctgaatccattgataatttcttgtactggtttttgagagctcgcatcaatctagcatttctagctcccggattgaaaacagaaagaggatcgtacatccagggtccattttctgtaaatagaatcgtataatgtcccttcaagaagatatcagacgatccacaatcaaagaattggtctccgagtttgtaacaaactgcggactttaacctatacatgataccgtttagcataatttctggtgatacgtcaatcggagtatcatctattagagatctaaagccggtgtaacattctccaccaaacatattcttattctgacgtcgttctacataaaacatcattgctccattaacgataacaggggaatgaacagcactacccatcacattagttcccaatggatcaatgtgtgtaactccagaacatcttccatagcctatgttaggaggagcgaacaccactcttccactattgccatcgaatgccatagaataaatatccttggaattgatagaaatcggactgtcggatgttgtgatcatcttcataggattaacaactatgtatggtgccgcctgaagtttcatatcgtaactgatgccgtttataggtctagccacagaaaccaacgtaggtctaaatccaactatagacaaaatagaagccaatatctgttcctcatctgtcataacttgagagcatccagtatgaataatcttcattagatggggatctaccgcatcatcatcgttacaataaaaaattcccattctaatgttcataattgcttttctaatcatggtatgcatgtttgctctctgaatctctgtggaaattagatctgatacacctgtaatcactatcggattatcctccgtaagacgattaaccaacaacatataattataagactttacttttctaaattcataaagttgctggattaggctataggtgtctccatgtacatacgcgttctcgagcgcaggaagtttaataccgaatagtgccatcagaataggatgaatatagtaattagtttctggttttctataaataaaagacaaatcttgtgaactagacatatcggtaaaatgcatggattggaatcgtgtagtcgacagaagaatatgatgattagatggagagtatattttatctaactctttgagttggtcaccgattctaggactagctcgagaatgaataagtactaaaggatgagtacatttcacagaaacactagcattgttcaatgtgctctttacatgggtaaggagttgaaatagctcgtttctatttgttctgacaatatttagtttattcataatgttaagcatatcctgaatagtaaagttagatgtgtcatacttgttagtagttagatatttagcaattgcattcccatcatttctcaatctcgtactccaatcatgcgtggatgctacttcgtcgatggaaaccatacaatcctttttgataggctgttgagattgatcatttcctgcacgtttaggtttggtacgttgatttctagcccctgcggatataaagtcatcgtctacaatttgggacaatgaattgcatacactacaagacaaagatttatcagaagtgtgaatatgatcttcatctaccaaagaaagagtttgattagtataactagattttagtcctgcgttagatgttaaaaaaacatcgctattgaccacggcttccattatttatattcgtagtttttactcgaaagcgtgattttaatatccaatcttattacttttggaatcgttcaaaacctttgactagttgtagaatttgatctattgccctacgcgtatactcccttgcatcatatacgttcgtcaccagatcgtttgtttcggcctgaagttggtgcatatctctttcaacattcgacatgagatccttaagggccatatcgtctagattttgttgagatgctgctcctggatttggattttgttgtgctgttgtacatactgtaccaccagtaggtgtaggagtacatacagtggccacaataggaggttgagaaagtgtaaccgttggagtagtacaagaaatacttccatccgattgttgtgtacatgtagttgttggtaacgtctgagaaggttgggtagatggcggcgtcgtcgttttttgatctttattaaatttagagataatatcctgaacagcattgctcggcgtcaacgctggaaggagtgaactcgccggcgcatcagtatcttcagacagccaatcaaaaagattagacatatcagatgatgtattagtttgttgtcgtggttttggtgtaggagcagtactactaggtagaagaataggagccgatgtagctgttggaaccggctgtggagttatatgaatagttggttgtagcggttggataggctgtctgctggcggccatcatattatctctagctagttgttctcgcaactgtctttgataatacgactcttgagactttagtcctatttcaatcgcttcatcctttttcgtatccggatccttttcttcagaataatagattgacgactttggtgtagaggattctgccagcctctgtgagaacttgttaaagaagtccatttaaggctttaaaattgaattgcgattataagattaaatggcagacacagacgatattatcgactatgaatccgatgatctcaccgaatacgaggatgatgaagaagaggaagaagatggagagtcactagaaactagtgatatagatcccaaatcttcttataagattgtagaatcagcatccactcatatagaagatgcgcattccaatcttaaacatatagggaatcatatatctgctcttaaacgacgctatactagacgtataagtctatttgaaatagcgggtataatagcagaaagctataacttgcttcaacgaggaagattacctctagtttcagaattttctgacgaaacgatgaagcaaaatatgctacatgtaattatacaagagatagaggagggttcttgtcctatagtcatcgaaaagaacggagaattgttgtcggtaaacgattttgacaaagatggtctaaaattccatctagactatattatcaaaatttggaaacttcaaaaacgatattagaatttatacgaatatcgttctctaaatgtcacaatcaagtctcgcatgttcagcaatttattgtcgtactttatatcgtgttcattaacgatatcttgcaaaatagtaatgattctatcttccttcgatagatattcttcagagattattgtcttatattctttcttgttatcagatatgaatttgataagactttgaacattattgatacccgtctgtttaattttttctacagatattttagttttggcagattctatcgtatctgtcaatagacatccaacatcgacattcgacgtcaattgtctataaatcaacgtataaattttagaaataacattagcgaattgttgtgcgttgatgtcgttattctgaaacagtatgattttaggtagcattttcttaacaaagagaacgtatttattgttactcagttgaacagatgatatatccagattactaacgcatctgattccgtataccaaactttcagaagaaatggtatacaattgtttgtattcattcaatgtctctttttcagaaattagtttagagtcgaatactgcaataattttcaagagatagttttcatcagataagattttatttagtgtagatatgataaaactattgttttgttggagaacttgatacgccgcgttctctgtagtcgacgctctcaaatgggaaacaatctccattatttttttggaatcggatactatatcttcggtatcttgacgcagtctagtatacatagagttaagagagattagagtttgtacattaagcaacatgtctctaaatgtggctacaaacttttcctttttcacatcatctagtttattatataccgatttcacaacggcaccagatttaaggaaccagaatgaaaaactctgataactacaatatttcatcatagttacgattttatcatcttctatagttggtgtaatagcgcatacctttttctccaagactggaaccaacgtcataaaaatgtttaaatcaaaatccatatcaacatctgatgcgctaagaccagtctcgcgttcaagattatctttactaatggtgacgaactcatcgtataaaactctaagtttgtccattatttatttacagatttagttgtttaatttatttgtgctcttccagagttgggatagtatttttctaacgtcggtattatattattaggatctacgttcatatgtatcataatattaatcatccacgttttgataaatctatctttagcttctgaaataacgtatttaaacaaaggagaaaaatatttagctacggcatcagacgcaataacattttttgtaaatgtaacgtatttagacgacagatcttcgttaaaaagttttccatctatgtagaatccatcggttgttaacaccattcccgcgtcagattgaataggagtttgaatagtttgttttggaaatagatccttcaataacttatagttgggtgggaaaaaatcgattttatcactagactctttcttttttactatcattacctcatgaactatttcttgaatgagtatatgtattttctttcctatatcggacgcgttcattggaaaatataccatgtcgttaactataagaatatttttatcctcgtttacaaactgaataatatcagatgtagttcgtaaacgaactatatcatcaccagcacaacatctaactatatgatatccactagtttcctttagccgtttattatcttgttccatattagcagtcattccatcatttaagaaggcgtcaaaaataatagggagaaatgacattttggattctgttacaactttaccaaaattaaggatatacggacttactatctttttctcaacgtcaatttgatgaacacacgatgaaaatgtgcttctatgagattgatcatgtagaaaacaacaagggatacaatatttccgcatatcatgaaatatattaagaaatcccaccttattatatttccccaaaggatccatgcacgtaaacattatgccgttatcattaataaagacttctttctcatcggatctgtaaaagttgttactgatttttttcattccaggatctagataattaataatgatgggttttctattcttattctttgtattttggcatatcctagaccagtaaacagtttccactttggtaaaatcagcagacttttgaacgctattaaacatggcattaatggcaataactaaaaatgtaaaatatttttctatgttaggaatatggtttttcactttaatagatatatggtttttggccaaaatgatagatatttttttatccgaggatagtaaaatattattagtcgccgtctctataaaaatgaagctagtctcgatatccaattttattctagaattgataggagtcgccaaatgtaccttatacgttatatctcccttgatgcgttccatttgtgtatctatatcggacacaagatctgtaaatagttttacgttattaatcatcacggtatcgccgtcgctagataacgctaatgtaccatccaagtcccaaatggagagatttaactgttcatcgtttagaataaaatgattaccggtcatattaataaagtgttcatcgtatctagataacaacgacttataattaatgtccaagtcttgaactcgctgaatgatcttttttaacccagttagttttagattggtacgaaatatattgttaaactttgattctacagtaatgtccaaatctagttgtggaaatacttccatcaacattgtttcaaacttgataatattattatctacatcttcgtacgatccaaattccggaatagatgtatcgcacgctctggccacccagataaccaaaaagtcacacgctccaggatatacattgtataaaaagctatcgttttttagtagggtttttttctgcgtgtatacgaagggattaaaaatagtattatcaacgtaactatattccaaattattcttatgagaatagataataatatcgtccttaatatctaacaaatttcctaaatatccctttaattgagtcattcgaagcgtcaatagaatatgtctcttaactatttccggctgttgtatatttaaatgacttcgtaaaaaataatatatgggcgacttctcatctatgtaatcatatggagtgagatatagggctcgttctacctcctgccccttacccacctgtaataccaattgcggacttactatatatcgcatatttatatcgtggggtaaagtgaaaatctactaccgatgatgtaagtcttacaatgttcgaaccagtaccagatcttaatttggaggcctccgtagaactaggggaggtaaatatagatcaaacaacacctatgataaaggagaatagcggttttatatcccgcagtagacgtctattcgcccatagatctaaggatgatgagagaaaactagcactacgattctttttacaaagactttattttttagatcatagagagattcattatttgttcagatgcgttgacgctgtaaaagacgtcactattaccaaaaaaaataacattatcgtggcgccttatatagcacttttaactatcgcatcaaaaggatgcaaacttacagaaacaatgattgaagcattctttccagaactatataatgaacatagtaagaaatttaaattcaactctcaagtatccatcatccaagaaaaactcggataccagtttggaaactatcacgtttatgattttgaaccgtattactctacagtagctctggctattcgagatgaacattcatctggcatttttaatatccgtcaagagagttatctggtaagttcattatctgaaataacatatagattttatctaattaatctaaaatctgatcttgttcaatggagtgctagtacgggcgctgtaattaatcaaatggtaaatactgtattgattacagtgtatgaaaagttacaactggtcatagaaaatgattcacaatttacatgttcattggctgtggaatcaaaacttccaataaaattacttaaagatagaaatgaattatttacaaaattcattaacgagttaaaaaagaccagttcattcaagataagcaaacgcgataaggatacgctactaaaatattttacttaggactggagttagaatttatagacgactcatttcgtttatcattgttactattattactattactatcattattagtgttggcattattagtattcttcttgtcatcttgttcagaaatatacagcaatgctatacctaatactaaatacattatcatgctcgcaatggctctaacaacaacgaaccaaaatgaatttggtcgtagcttttgttcacaaaaatacataaagaaatgtctacataaatctatggcgccattggctacttgaaatagcgccagtcctcctacagattttaatatagctgtataacatgacatttattcatcatcaaaagagacagagtcaccatctgtcatatttagattttttttcatgtgttcaaagtatcctctactcatttcattataatagtttatcatacttagaattttaggacggatcaatgagtaagacttgactagatcgtcagtagtaatttgtgcatcgtctattctgcatccgcttcgtcgaataatgtatagcatcgctttgagattctccatagctatcaagtctttatacaatgacatggaaatatctgtgaatactttatacttctccaacatcgatgccttaacatcatcgcctactttagcattgaaaatacgttctattgtgtagatggatgtagcaagatttttaaacaacaatgccatcttacacgatgattgcctcaagtctccaatcgtttgtttagaacgattagctacagagtccaatgcttggctgactagcatattattatctttagaaattgtattcttcaatgaggcgtttatcatatctgtgatttcgttagtcatattacagtctgactgggttgtaatgttatccaacatatcacctatggatacggtacacgtaccagcatttgtaataatcctatctaagatgttgtatggcattgcgcagaaaatatcttctcctgtaatatctccactctcgataaatctactcagattattcttaaatgccttattctctggagaaaagatatcagtgtccatcatttcattaatagtatacgcagaaaagataccacgagtatcaattctatccaagatacttatcggttccgagtcacagataatggtttcctctccttcgggagatcctgcatagaaatatctaggacaatagtttctatactgtctgtaactctgataatctctaaagtcactaactgataccatgaaattgagaagatcaaacgctgaagtaattaatttttctgcctcgtttttactacaactagttttcatcaatgtagtgacgatgtattgtttagttacttttggtctaatactgatgatagagatattattgcttcccataatggatcttctagtagtcaccttaaagcccattgatgcgaatagcagatagataaagtcttggtatgactcctttctaatatagtacggactacctttgtcacccaactttatacccacataagccataacaacctctttaatagccgtttcatgaggtttatcagccatgagcctgagtagttggaagaatctcatgaatcccgtctcagaaagtcctatatgcatgatagatttatctttcctgggaaactctcgtatagtcatagatgaaatactctttaaagtttctgaaataagattagtaacagtcttacctccgactactctaggtaacaaacaaactctaataggtgttttctctgcggagataatatcagaaaggatagagcaataagtagtattattgtgattataaagaccgaatacataacaggtagaatttataaacatcatgtcctgaaggtttttagacttgtattcctcgtaatccataccgtcccaaaacatggatttggtaactttgatagccgtagatctttgttccttcgccaacaggttaaagaaattaataaagaatttgttgtttctatttatgtccacaaattgcacgtttggaagcgccacggttacattcactgcagcattttgaggatcgcgagtatgaagtacgatgttattgtttactggtatatctggaaagaaatctaccagtctaggaataagagattgatatcgcatagaaatagtaaagtttataatctcatcatcgaagagcattttgttaccattgtaataaatatccactctgtcatatgtataaatgaagtactgttcaaacatgatgagatgtttatatgttggcatagtagtgagatcgacgtttggtaatggcaatgtattaagattaactccataatgtctagcagcatctgcgatgttataagcgtcgtcaaagcggggtcgatcttgtattgttatatattgtctaacacctataagattatcaaaatcttgtctgcttaatacaccgttaacaatttttgccttgaattcttttattggtgcattaataacatccttatagaggatgttaaacaaataagtgttatcaaagttaagatctggatatttcttttctgctagaacatccattgagtcggagccatctggtttaatataaccaccgataaatctagctctgtattctgtatccgtcaatctaatattaagaaggtgttgagtgaaaggtggaagatcgtaaaagctgtgagtattaatgataggattagtttccgaactaatgttaattggggtattaataatatctatatttccagcgttaagtgtaacattaaacagttttaattcacgtgacgtggtatcaattaaataattaatgcccaatttggatatagcagcctgaagctcatcttgtttagttacggatcctaatgagttattaagcaatatatcgaacggatgaacgaaggttgttttaagttggtcacatactttgtaatctagacatagatgcggaagaacggtagaaactatacgaaataaatattcagagtcctctaattgatcaagagtaactattgacttaataggcatcatttatttagtattaaatgacgaccgtaccagtgacggatatacaaaacgatttaattacagagttttcagaagataattatccatctaacaaaaattatgaaataactcttcgtcaaatgtctattctaactcacgttaacaacgtggtagatagagaacataatgccgccgtagtgtcatctccagaggaaatatcctcacaacttaatgaagatctatttccagatgatgattcaccggccactattatcgaacgagtacaacctcatactactattattgacgatactccacctcctacgtttcgtagagagttattaatatcggaacaacgtcaacaacgagaaaaaagatttaatattacagtatcgaaaaatgctgaagcaataatggaatctagatctatgataacttctatgccaacacaaacaccatccttgggagtagtttatgataaagataaaagaattcagatgttagaggatgaagtggttaatcttagaaatcaacgatctaatacaaaatcatctgataatttagataattttaccaaaatactatttggtaagactccgtacaaatcaacagaagttaataagcgtatagccatcgttaattatgcaaatttgaacgggtcccccttatcagtcgaggacttggatgtttgttcggaggatgaaatagatagaatctataaaacgattaaacaatatcacgaaagtagaaaacgaaaaattatcgtcactaacgtgattattattgtcataaacattatcgagcaggcattgctaaaactcggatttgaagaaatcaaaggactgagtaccgatatcacttcagaaattatcgatgtggagatcggagatgactgcgatgctgtagcatctaaactaggaatcggtaacagtccggttcttaatattgtattgtttatactcaagatattcgttaaacgaattaaaattatttaatttaatacattcccatatccagacaacaatcgtctggattaatctgttcctgtcgtctcataccggacgacatattaatctttttattagtgggcatctttttagatggtttctttttcccagcattaactgagtcgatacctagaagatcgtgattgatctctccgaccattccacgaacttctaattggccgtctctgacggtaccataaactattttaccagcattagtaacagcttggacaatctgaccatccatcgcattgtacgatgtagtagtaactgttgttctacgtctaggagcaccagaagtatttttggagcccttggatgttgatgtagaagaagacgaggattttgattttggtttacatgtaatacattttgaactctttgattttgtatcacatgcgccggcagtcacatctgtttgagaattaagattattgttgcctcctttgacggctgcatctccaccgatttgcgctagtagatttttaagctgtggtgtaatcttattaactgtttcgatataatcatcgtaactgcttctaacggctaaattttttttatccgccatttagaagctaaaaatatttttatttatgcagaagatttaactagattatacaatgaactaatatgatccttttccagattatttacaaacttggtattttttggttctggaggaggcgaatttaaattcggacttggattcggattttgtaagttcttgatcttattatacatcgagtataggatggcgacagtaactgctacacaaataccgatcaaaagaagaataccaatcatttattgacaataacttcactattgatcaagtatgcaatatatcatcttttcactaaataagtagtaataatgattcaacaatgtcgagatatatggacgataataatttagttcatggaaatatcgctatgattggtgtgaatgactccgctaactctgtggggtgcgcagtgctttccccacatagaataaattagcattccgactgtgataataataccaagtataaacgccataatactcaatactttccatgtacgagtgggactggtagacttactaaagtcaataaaggcgaagatacacgaaagaatcaaaagaatgattccagcgattagcacgccggaaaaataatttccaatcataagcatcatgtccatttaactaataaaaattttaaatcgccgaatgaacaaagtggaatataaaccatataaaaacaatagtttgtactgcaaaaataatatctatttttgttttcgaagatatggtaaaattaaatagtagtacacagcatgttataactaacagcagcaacggctcgtaattacttatcatttactagacgaaaaggtggtgggatattttcttgctcaaataatacgaatatatcacccatccattttatgcgatgtttatatactctaatctttaatagatctatagacgacgggtttaccaacaatatagattttatcgattcatctaatttaaacccttccttaaacgtgaatgatctattatctggcataacgatgaccctacctgatgaatcggacaatgtactgggccatgtagaataaattatcaacgaattatcgtctacgaacatttatatcatttgttttaattttaggacgcgaataaatggatataaaatagaaaataacagatattacaaccagtgttatggccgcgcccaaccaggtaggcagttttattttatcttttactacaggttctcctggatgtacgtcaccaacggcggacgtagttctagtacaattagacgtaagttccgcttgggaattttttaacgctaaagagttaacgttaatcgtgcacccaacgtatttacatctagttcgttgaacatcttgattataatataaccattttctatctctagattcgtcagtgcactcatgtaaccaacataccctaggtcctaaatatttatctccggaattagattttggataattcgcgcaccaacaatttctatttcctttatgatcgttacaaaagacgtataatgccgtatccccaaaagtaaaataatcaggacgaataattctaataaactcagaacaatatctcgcatccatatgtttggagcaaatatcggaataagtagacatagccggtttccgttttgcacgtaaccattctaaacaattggggtttccaggatcgtttctacaaaatccagtcatgaaatcgtcacaatgttctgtcttgtaattattattaaatatttttggacagtgtttggtatttgtcttagaacaacattttgccacgctatcactatcgcccaggagataatccttttttataaaatgacatcgttgcccggatgctatataatcagtagcgtgttttaaatccttaatatattcaggagttacctcgttctgataatagattaatgatccaggacgaaatttgaaagaactacatggttctccatgaattaatacatattgtttagcaaattcaggaactataaaactactacaatgatctatcgacataccatctatcaaacaaaacttgggtttaatttctcccggagatgtttcataatagtacgtataactttcttctgcaaacttaacagctctattatattcaggataattaaaacctaattccatatatttgtctcgtatatctgctattcctggtgctattttgattctattaagagtaacagctgcccccattcttaataatcgtcagtatttaaactgttaaatgttggtatatcaacatctaccttatttcccgcagtataaggtttgttgcaggtatactgttcaggaatggttacatttatacttcttctatagtcctgtctttcgatgttcatcacatatgcaaagaacagaataaacaaaataatgtaagaaataatattaaatatctgtgaattcgtaaatacattgattgccataataattacagcagctacaatacacacaatagacattcccacagtgttgccattacctccacgatacatttgagttactaagcaataggtaataactaagctagtaagaggcaatagaaaagatgagataaatatcatcaatatagagattagaggagggctatatagagccaagacgaacaaaatcaaaccgagtaacgttctaacatcattatttttgaagattcccaaataatcattcattcctccataatcgttttgcatcatacctccatctttaggcataaacgattgctgctgttcctctgtaaataaatctttatcaagcactccagcacccgcagagaagtcgtcaagcatattgtaatatcttaaataactcatttatatattaaaaaatgtcactattaaagatggagtataatctttatgccgaactaaaaaaaatgacttgtggtcaacccctaagtctttttaacgaagacggggatttcgtagaagttgaaccgggatcatcctttaagtttctgatacctaagggattttacgcctctccttccgtaaagacgagtctagtattcgagacattaacaacgaccgataataaaatcactagtatcaatccaacaaatgcgccaaagttatatcctcttcaacgcaaagtcgtatctgaagtagtttctaatatgaggaaaatgatcgaatcaaaacgtcctctatacatcactcttcacttggcgtgtggatttggtaagactattaccacgtgttatcttatggctacacacggtagaaaaaccgtcatttgcgtacccaataaaatgttaatacatcaatggaagacacaggtagaggcagtcggattggaacataagatatccatagatggagtaagtagtctattaaaggaactaaagactcaaagtccggatgtattaatagtagtcagtagacatctgacaaacgatgccttttgtaaatatatcaataagcattatgatttgttcatcttggatgaatcacatacgtataatctgatgaacaatacagcagttacaagatttttagcgtattatcctccgatgatgtgttattttttaactgctacacctagaccatctaaccgaatttattgtaacagtattattaatattgccaagttatccaatctaaaaaaaactatctatgcagtagatagtttttttgagccatattccacagataatattagacatatggtaaaacgactagatggaccatctaataaatatcatatatataccgagaagttattatctgtagacgagcctagaaatcaacttattcttgataccctggtagaagaattcaagtcaggaactattaatcgcattttagttattactaaactacgtgaacatatggtattattctacaaacgattattagattttttcggaccagaggttgtatttataggagacgcccaaaatagacgtactccagatatggtcaaatcaatcaaggaactaaatagatttatattcgtatccaccttattttattccggtactggtttagatattcctagtttggattcgttgttcatttgctcggcagtaatcaacaatatgcaaatagagcaattactagggagggtatgtcgagaaacagaactattagataggacggtatatgtatttcctaacacatccatcaaagaaataaagtacatgataggaaatttcatgcaacgaattattagtctgtctgtagataaactaggatttaaacaaaaaagttatcggaaacatcaagaatccgatcccacttctgcatgtacaacatcatccagagaagaacgtgtattaaatagaatatttaactcgcaaaatcgttaagaagtttaagcgacgatccgcatgctgcgcaggccagtgtattacccctcatagtattaatataatccaatgatacttttgtgatgtcggaaatcttaaccaatttagactgacaggcagaacacgtcatgcaatcatcatcgtcatcgataactgtagtcttgggcttctttttgcgactcttcattccggaacgcacattggtgctatccatttaggtagtaaaaaataagtcagaatatgccctataacacgatcgtgcaaaacctggtatatcgtctctatctttatcacaatatagtgtatcgacatttttattattattgacctcgtttatcttggaacatggaatgggaacatttttgttatcaacggccatctttgccttaattccagatgttgtaaaattataactaaacagtctatcatcgacacaaatgaaattcttgtttagacgtttgtagtttacgtatgcggctcgttcgcgtctcattttttcagatattgcaggtactataatattaaaaataagaatgaaataacataggattaaaaataaagttatcatgacttctagcgctgatttaactaacttaaaagaattacttagtctgtacaaaagtttgagattttcagattctgcggctatagaaaagtataattctttggtagaatggggaacatctacttactggaaaataggcgtgcaaaaggtagctaatgtcgagacgtcaatatctgattattatgatgaggtaaaaaataaaccgtttaatattgatccgggctattacattttcttaccggtatattttgggagcgtctttatttattcgaagggtaaaaatatggtagaacttggatctggaaactcttttcaaataccagatgatatgcgaagtgcgtgtaacaaagtattagacagcgataacggaatagactttctgagatttgttttgttaaacaatagatggataatggaagatgctatatcaaaatatcagtctccagttaatatatttaaactagctagtgagtacggattaaacatacccaaatatttagaaattgaaatagaggaagacacattatttgacgacgagttatactctattatagaacgctctttcgatgataaatttccaaaaatatccatatcgtatattaagttgggagaacttagacggcaagttgtagactttttcaaattctcattcatgtatattgagtccatcaaggtagatcgtataggagataatatttttattcctagcgttataacaaaatcaggaaaaaagatattagtaaaagatgtagaccatttaatacgatccaaggttagagaacatacatttgtaaaagtaaaaaagaaaaacacattttccattttatacgactatgatggaaacggaacagaaactagaggagaagtaataaaacgaattatagacactataggacgagactattatgttaacggaaagtatttctctaaggttggtagtgcaggcttaaagcaattgactaataaattagatattaatgagtgcgcaactgtcgatgagttagttgatgagattaataaatccggaactgtaaaacgaaaaataaaaaaccaatcagcatttgatttaagcagagaatgtttgggatatccagaagcggattttataacgttagttaataacatgcggttcaaaatagaaaattgtaaggttgtaaatttcaatattgaaaatactaattgtttaaataacccgagtattgaaactatatatggaaactttaaccagttcgtctcaatctttaatgtcgtcaccgatgtcaaaaaaagattattcgagtgaaataatatgcgcctttgatataggtgcaaaaaatcctgccagaactgttttagaagtcaaggataactccgttagggtattggatatatcaaaattagactggagttctgattgggaaaggcgcatagctaaagatttgtcacaatatgaatacactacagttcttctagaacgtcagcctagaaggtcgccgtatgttaaatttatctattttattaaaggctttttatatcatacatcggctgccaaagttatttgcgtctcgcctgtcatgtctggtaattcatatagagatcgaaaaaagagatcggtcgaagcatttcttgattggatggacacattcggattgcgagactccgttccggatagacgcaaattagacgatgtagcggatagtttcaatttggctatgagatacgtattagataaatggaatactaattatacaccttataataggtgtaaatctagaaattacataaaaaaaatgtaataacgttagtaacgccattatggataatctatttacctttctacatgaaatagaagatagatatgccagaactatttttaactttcatctaataagttgcgatgaaataggagatatatatggtcttatgaaagaacgcatttcctcagaggatatgtttgataatatagtgtataataaagatatacatcctgccattaagaaactagtgtattgcgacatccaacttactaaacacattattaatcagaatacgtatccggtatttaacgattcttcacaagtgaaatgttgtcattatttcgacataaactcagataatagcaatattagctctcgtacagtagagatatttgagagggaaaagtcatctcttgtatcatatattaaaactaccaataagaagagaaaggtcaattacggcgaaataaagaaaactgttcatggaggcactaatgcaaattacttttccggtaaaaagtctgacgagtatctgagtactacagttagatccaacattaatcaaccttggatcaaaaccatctctaagaggatgagagttgatatcattaatcactctatagtaacgcgtggaaaaagctctatattacaaactatagaaattatttttactaatagaacatgtgtgaaaatattcaaggattctactatgcacattattctatccaaggacaaggatgaaaaggggtgtatacacatgattgacaaattattctatgtctattataatttatttctgttgttcgaagatatcatccaaaacgagtactttaaagaagtagctaatgttgtaaaccacgtactcacggctacggcattagatgagaaattattcctaattaagaaaatggctgaacacgatgtttatggagttagcaatttcaaaatagggatgtttaacctgacatttattaagtcgttggatcataccgttttcccctctctgttagatgaggatagcaaaataaagttttttaaggggaaaaagctcaatattgtagcattacgatctctggaggattgtataaattacgtgactaaatccgagaatatgatagaaatgatgaaggaaagatcgactattttaaatagcatagatatagaaacggaatcggtagatcgtctaaaagaattgcttctaaaatgaaaaaaaacactaattcagaaatggatcaacgactagggtataagtttttggtgcctgatcctaaagccggagttttttatagaccgttacatttccaatatgtatcgtattctaattttatattgcatcgattgcatgaaatcttgaccgtcaagcggccactcttatcgtttaagaataatacagaacgaattatgatagaaattagcaatgttaaagtgactcctccagattactcacctataatcgcgagtattaaaggtaagagttatgacgcattagccacgttcactgtaaatatctttaaagaggtaatgaccaaagagggtatatccatcactaaaataagtagttatgagggaaaagattctcatttgataaaaattccgctactaataggatacgggaataaaaatccacttgatacagccaagtatcttgttcctaatgtcataggtggagtctttatcaataaacaatctgtcgaaaaagtaggaattaatctagtagaaaagattacaacatggccaaaatttagggttgttaagccaaactcattcactttctcgttttcctccgtatcccctcctaatgtattaccgacaagatatcgccattacaagatatctctggatatatcacaattggaagcgttgaatatatcatcgacaaagacatttataacggtcaatattgttttgctgtctcaatatttatctagagtgagtctagaattcattagacgtagtttatcatacgatatgcctccagaagttgtctatctagtaaacgcgataatagatagtgctaaacgaattactgaatctattactgactttaatattgatacatacattaatgacctggtggaagctgaacacattaaacaaaaatctcagttaacgatcaacgagttcaaatatgaaatgctgcataactttttacctcatatgaactatacacccgatcaactaaagggattttatatgatatctttactaagaaagtttctctactgtatcttccacacttctagatatccagatagagattcgatggtttgtcatcgcatcctaacgtacggcaaatattttgagacgttggcacatgatgaattagagaattacataggcaacatccgaaacgatatcatgaacaatcacaagaacagaggcacttacgcggtaaacattcatgtactaacaactcccggacttaatcacgcgttttctagcttattgagtggaaagttcaaaaagtcagacggtagttatcgaacacatcctcactattcatggatgcagaatatttctattcctaggagtgttggattttatccggatcaagtaaagatttcaaagatgttttctgtcagaaaataccatccaagtcaatatctttacttttgttcatcagacgttccggaaagaggtcctcaggtaggtttagtatctcaattgtctgtcttgagttccattacaaatatactaacgtctgagtatttggatttggaaaagaaaatttgtgagtatatcagatcatattataaagatgatataagttactttgaaacaggatttccaatcactatagaaaatgctctagtcgcatctcttaatccaaatatgatatgtgattttgtaactgactttagacgtagaaaacggatgggattcttcggtaacttggaggtaggtattactttagttagggatcacatgaatgaaattcgcattaatattggagcgggaagattagtcagaccattcttggttgtggataacggagagctcatgatggatgtgtgtccggagttagaaagcagattagacgacatgacattctctgacattcagaaagagtttccgcatgtcatcgaaatggtagatatagaacaatttacttttagtaacgtatgtgaatcggttcaaaaatttagaatgatgtcaaaggatgaaagaaagcaatacgatttatgtgactttcctgccgaatttagagatggatatgtagcatcttcattagtgggaatcaatcacaattctggacccagagctattcttggatgtgctcaagctaaacaagctatctcttgtctgagctcggatatacgaaataaaatagacaatggaattcatttgatgtatccagagaggccaatcgtgattagtaaggctttagaaacttcaaagattgcggctaattgcttcggccaacatgttactatagcattaatgtcgtacaaaggtatcaatcaagaggatggaattatcatcaaaaaacaatttattcagagaggcggtctcgatattgttacagccaagaaacatcaagtagaaattccattggaaaactttaataacaaagaaagagataggtctaacgcctattcaaaattagaaagtaatggattagttagactgaatgctttcttggaatccggagacgctatggcacgaaatatctcatcaagaactcttgaagatgattttgctagagataatcagattagcttcgatgtttccgagaaatataccgatatgtacaaatctcgcgttgaacgagtacaagtagaacttactgacaaagttaaggtacgagtattaaccatgaaagaaagaagacccattctaggagacaaatttaccactagaacgagtcaaaagggaacagtcgcgtatgtcgcggatgaaacggaacttccatacgacgaaaatggtatcacaccagatgtcattattaattctacatccatcttctctagaaaaactatatctatgttgatagaagttattttaacagccgcatattctgctaagccgtacaacaataagggagaaaaccgacctgtctgttttcctagtagtaacgaaacatccatcgatacatatatgcaattcgctaaacaatgttatgagcattcaaatccgaaattgtccgatgaagaattatcggataaaatcttttgtgaaaagattctctatgatcctgaaacggataagccttatgcatccaaagtattttttggaccaatttattacttgcgtctgaggcatttaactcaggacaaggcaaccgttagatgtagaggtaaaaagacgaagctcattagacaggcgaatgagggacgaaaacgtggaggaggtatcaagttcggagaaatggagagagactgtttaatagcgcatggtgcagccaatactattacagaagttttgaaagattcggaagaagattatcaagatgtgtatgtttgtgaaaattgtggagacatagcagcacaaatcaagggtattaatacatgtcttagatgttcaaaacttaatctctctcctctcttaacaaaaattgataccacgcacgtatctaaagtatttcttactcaaatgaacgccagaggcgtaaaagtcaaattagatttcgaacgaaggcctccttcgttttataaaccattagataaagttgatctcaagccgtcttttctggtgtaatattctagtttggtagtagatacatatcaatatcatcaaattcgagatccgaattataaaatgggcgtggattgttaactatagaatcggacgtctgatattcgaaaatctgtggagtttcaggttttggtggaggtgtaactgctacttgggatactgaagtctgatattcagaaagctgtggatgttctggttcggcatccaccgatggtgtcacatcactaatcggttcggtaacgtctgtggatggaggtgctacttctacagaacctgtagcctcagttgtcaacggagatacatttttaatgcgagaaaatgtataatttggtaatggtttcttatgtggatctgaagaagaggtaagatatctactagaaagataccgatcacgttctagttctcttttgtagaacttaactttttctttctccgcatctagttgatattccaacctcttcacgttactacgttcagattccaattcacgttcgcatgggttacctccgcagtttttacgagcgatttcacgttcagccttcatgcgtctctccctctctctatcgagtttatcagagcagtctttctgaaggcgatcgaactccataaatttctccaacgctttgattgtttccatagatttccgaagttcagcttttaggactgtgattctttttctttcgaattcacagctggatgtacaaccgtttccattaccgccatctctaagtttcttttctagatcggcaacatttcatccccatgccttttacattcctcgagtctactgtcgtcgaaatatcgttccagctccttttcgacatcaataactttagcacgttgtctctcaagctctcttttgtagttatctgattccctggcacgtttaagatcttcatgcaattgagtcagctcttaacttcctctcttgcttcttcgtcatagtacgcgcaatcactgtgagatccattgttaccacgtctacactcggcgagctcgcgtttaagagattcaatttcccgtttgtattggtccatgtttccattgctaccaccattagatttacaggctgctagttgtcgttcgagatcagaaatacgggttttcttggaattgatttcgtcgatgtacttggcatcgaaacacttattaagttctttttccaattctacgattttatttctttcgcgagtcaattccctcctgtagtaactatctgttttgtcagattcacgctctctacgtagactttcttgcaagttactaatttgttccctagcacgtccgagtttagttttatatgctgaatagagttctgattcatcctttgagcagatctctagcgatcgtttaagattcctaattctagtctttagcctatttacctcctcagaagatgttccgttaccgttgcgtttacactcgttaagctgtctatcaagatccatgattctatctctaagacgttgcatctctctttccatatcagcattgctttcattattacgtctgcagtcactcaactgtctttcaatatctgagattctatctctaagacgtcgcatctctctctgtttcggcattggtttcattattacgtttacagtcgttcaactgtctttcaagatctgatattctagattggagtctgctaatctctgtagcattttcacggcattcactcagttgtctttcaagatctgaaattttagattggagtctgctaatctctgtaagatttcctcctccgctctcgatgcagtcggtcaacttattctctagttctctaatacgcgaacgcagtgcatcaacttcttgcgtgtcttcctggttgcgtgtacattcatcgagatctctaacgcgtcgtcgttcttcctcaagttctctgcgtactacagaaagcgtgtccctatcttgttgatatttagcaatttctgattctagagtactgattttgcttacgtagttactaatagttgtcttggccttatcaagatcctccttgtatttgtcgcattccttgatatccctacgaagtctggacagttcccattcgacattacgacgtttatcgatttcagctcggagatcgtcatcgcgttgttttagccacatacgactgagttcaagttctcgttgacaagatccatctacttttccattcctaatagtatccagttccttttctagttctgaacgcatttctcgttccctatcaagcgattctctcaattctcggatagtcttcttatcaatttctaataaatctgaaccatcatctgtcccattttgaatatccctgtgttctttgatctcttttgtaagtcggtcgattctttcggttttataaacagaatccctttccaaagtcctaatcttactgagtttatcactaagttctgcattcaattcggtgagttttctcttggcttcttccaactctgttttaaactctccactatttccgcattcttcctcgcatttatctaaccattcaattagtttattaataactagttggtaatcagcgattcctatagccgttcttgtaattgtgggaacataattaggatcttctaatggattgtatggcttgatagcatcatctttatcattattagggggatggacaaccttaattggttggtcctcatctcctccagtagcgtgtggttcttcaataccagtgttagtaataggcttaggcaaatgcttgtcgtacgcgggcacttcctcatccatcaagtatttataatcgggttctacttcagaatattcttttctaagagacgcgacttcgggagttagtagaagaactctgtttctgtatctatcaacgctggaatcaatactcaagttaaggatagcgaatacctcatcgtcatcatccgtatcttctgaaacaccatcatatgacatttcatgaagtctaacgtattgataaatagaatcagatttagtattaaacagatccttaacctttttagtaaacgcatatgtatattttagatctccagatttcataatatgatcacatgccttaaatgtcagtgcttccatgatataatctggaacactaatgggtgacgaaaaagatacagcaccatatgctacgttgataaataaatctgaaccactaagtagataatgattaatgttaagaaagaggaaatattcagtgtataggtatgtcttggcgtcatatcttgtactaaacacgctaaacagtttgttaatgtgatcaatttccaatagattaattagagcagcgggaataccaacaaacatattaccacatccgtattttctatgaatatcacatatcatgttaaaaaatcttgatagaagagcgaatatctcgtctgacttaatgagtcgtagttcagcagcaacataagtcataactgtaaatagaacatactttcctgtagtgttgattctagactccacatcaacaccattattaaaaatagttttatatacatctttaatctgctctccgttaatcgtcgaacgttctagtatacggaaacactttgatttcttatctgtagttaatgacttagtgatatcacgaagaatattacgaattacatttcttgtttttcttgagagacctgattcagaactcaactcatcgttccatagtttttctacctcagtggcgaaatctttggagtgcttggtacatttttcaataaggttcgtgacctccatttattataaaaaatttattcaaaacttaactacaatcgggtaattataagatcgtagatctcccatgtggcggaatactaccatctatcgcatgtggatggacagtaggtaatggccatgggaacagtaatgtttgcatatttatctttcttgctagtattactgcatattgtcccaatgtttcgatgtgatgttctaacctatcaactgccgctgtatcacaacaatagtgtccgatgaaattaagattatgatccaatgtgtttaatatatgattatcaagtcttatacgatccgcgtcttttttgacaggatcaggttcttctacaggaagaagtttcggcctcttatgatattcatgtctgggaaacggtggtctagggtgaggctccggtatcggagtgggttttggattataatcatcatcgtctatgacatcatcttcgacttcgatatttattttgctatcttgatgatgtcctgtatcagttgcattttcagcactcgactgaatattagcgcattcattgtctattattaccatatttctaaacccaaaatgtatgtgttgaacatcagtactatcgttgatgagtcttatagcatgaattcgcttatcgttatcgggtttatcttctgtcaccttagcaattccttttttattaaactctacataatcatatccatttctattgtttgttctaatataaacgagtatagcatcattgctaaatttttcaatagtatcaaaaacagaatatcctaaaccatataatatatattcaggaacactcaaactaaatgtccaggattctcctaaatacgtaaactttaatagtgcgaaatcattcaaaaatctaccacttatagatagatagtacataaatgcgtatagtagtctacctatctctttattatgaaaaccggcattacgatcatatatgtcgtgatatacctgtgatccgtttacgttaaaccataaatacatgggtgatcctataaacatgaatttatttctaattctcagagctatagttaattgaccgtgtaatatttgcttacatgcatacttgatacgcttattaataagatttttatcattgctcgttatttcagaatcgtatatataaggagtaccatcgtgattcttaccagatattatacaaaatactatatataaaatatattgacccacgttagtaatcatataaatgtttaacgttttaaattttgtattcaatgatccattatcatacgctatcatggtcttgtaatattcattctttaaaatataatattgtgttagccattgcattggagctcctaatggagattttctattctcatccattttaggataggctttcataaagtccctaataacttcgtgaataatgtttctatgttttctactgatgcatgtatttgcttcgatttttttatcccatgtttcatctatcatagatttaaacgcagtaatgctcgcaacattaacatcttgaaccgttggtacaattccgttccataaatttataatgttcgccatttatataactcattttttgaatatacttttaattaacaaaagagttaagttactcatatggacgccgtccagtctgaacatcaatctttttagccagagatatcatagccgctcttagagtttcagcgtgattttccaacctaaatagaacttcatcgttgcgtttacaacacttttctatttgttcaaactttgttgttacattagtaatctttttttccaaattagttagccgttgtttgagagtttcctcattgtcgtcttcatcggctttaacaattgcttcgcgtttagcctctggctttttagcagcctttgtagaaaaaaattcagttgctggaattgcaagatcgtcatctccggggaaaagagttccgtccatttaaagtacagattttagaaactgacactctgcgttatttatatttggtacaacacatggattataaatattgatgttaataacatcagaaaatgtaaagtctatacattgttgcatcgtgttaaattttctaatggatctagtattattgggtccaacttctgcctgaaatccaaatatggaagcggatacaaaaccgtttcctggataaaccacacatctccacttttgctttacatcagaaattgtgtcgttgacatcttgaactctcctatctaatgccggtgttccacctatagattttgaatattcgaatgctgcatgagtagcattaaattccttaatattgccataattttcatatattgagtaaccctggataaaaagtaaacacaccgcagccgtcgctaccacaataaaaaaaattgatagagagttcatttataatctattagaagctgacaaaatttttttacacgcatcagacaatgctttaataaatagttcaacatctacttttgtcatatcgaaccgatggtatgattctaacctagaattacatccgaaaaagttgactatgttcatagtcattaagtcattaacaaacaacattccagactctggattataagacgatactgtttcgtcacaattacctaccttaatcatgtgattatgaatattggctattagagcaccttctaagaaatctataatatctttgaaacacgatttaaaatcaaaccacgaatatacttctacgaagaaagttagtttacccataggagaaataactataaatggagatctaaatacaaaatccggatctatgatagttttaacattattatattctctattaaatacctccacatctaaaaatgttaattttgaaactatgtcttcgtttattaccgtacctgaactaaacgctataagctctattgtttgagaactctttaaacgatattcttgaaatacatgtaacaaagtttcctttaactcggtcggtttatctaccatagttacagaatttgtatccttatctataatataataatcaaaatcgtataaagttatataattatcgcgttcagattgtgatcttttcaaatagactaaaaaccccatttctctagtaagtatcttatgtatatgtttgtaaaatatcttcatggtgggaatatgctctaccgcagttagccattcctcattgacagcggtagatgtattagacaaaactattccaatgtttaacaagggccattttacgagattattaaatccttgtttgataaatgtagccaatgagggttcgagttcaacgacgattgaattctcttcccgcggatgctgcatgatgaacgacgggatgttgttcgattgatttggaattctttttcgactttttgtttatattaaatattttaaaatttatagcggatagcaattcatgtaccacggataatgtagacgcgtattgcgcatcgatatctttattattagataaatttatcaataaatgtgagaagtttgcctcgttaaggtcttccatttaaatattatataaacatttgtgtttgtatcttattcgtcttttatggaatagttttttactagtaaagctgcaattacacactttgtccgtaaaacataaatataaacaccagcttttatcaatcgttccaaaaagtcgacggcggacatttttaacatggcatctattttaaatacacttaggtttttggaaaaaacatcattttataattgtaacgattcaataactaaagaaaagattaagattaaacataagggaatgtcatttgtattttataagccaaagcattctaccgttgttaaatacttgtctggaggaggtatatatcatgatgatttggttgtattggggaaggtaacaattaataatctaaagatgatgctattttacatggatttatcatatcatggagtgacaagtagtggagcaatttacaaattgggatcgtctatcgatagactttctctaaataggactattgttacaaaagttaataattatgatgatacattttttgacgacgatgattgatcgctattgcacaattttgtttttgtactttctaatatagtgtttaggttctttttcatatgagaatattgatttactaaaatatctatgtttaacttttgttctatgacgtccttatcggcggtatcggtacatatacgtaattcaccttcacaaaatacggagtcttcgataataatagccaatcgattattggatctagctgtctgtatcatattcaacatgtttaatatatcctttcgtttcccctttacaggcatcgatcgtagcatattttccgcgtctgatatggaaatgttaaaactacaaaaatgcgtaatgttagcccgtcctaatattggtacgtgtctataagtttggcatagtagaataatagacgtgtttaaatgccttccaaagtttaagaattctattagagtattgcattttgatagtttatcgcctacatcatcaaaaataagtaaaaagtgtgctgattttttatgattttgtgcgacagcaatacatttttctatgttacttttagttcgtatcagattatattctagagattcctgactactaacgaaattaatatgatttggccaaatgtatccatcataatctgggttataaacgggtgtaaacaagaatatatgtttatattttttaactagtgtagaaaacagagatagtaaatagatagtttttccagatccagatcctcctgttaaaaccattctaaacggcatttttaataaattttctcttgaaaattgtttttcttggaaacaattcataattatatttacagttactaaattaatttgataataaatcaaaatatggaaaactaaggttgttagtagggaggagaacaaagaaggcacatcgtgatataaataacatttattatcatgatgacaccagaaaacgacgaagagcagacatctgtgttctccgctactgtttacggagacaaaattcagggaaagaataaacgcaaacgcgtgattggtctatgtattagaatatctatggttatttcactactatctatgattaccatgtccgcgtttctcatagtgcgcctaaatcaatgcatgtctgctaacgaggctgctattactgacgccgctgttgccgttgctgctgcatcatctactcatagaaaggttgcgtctagcactacacaatatgatcacaaagaaagctgtaatggtttatattaccagggttcttgttatatattacattcagactaccagttattctcggatgctaaagcaaattgcactgcggaatcatcaacactacccaataaatccgatgtcttgactacctggctcattgattatgttgaggatacatggggatctgatggtaatccaattacaaaaactacatccgattatcaagattctgatgtatcacaagaagttagaaagtatttttgtgttaaaacaatgaactaatatttatttttgtacattaataaatgaaatcgcttaatagacaaactgtaagtaggtttaagaagttgtcggtgccggccgctataatgatgatactctcaaccattattagtggcataggaacatttctgcattacaaagaagaactgatgcctagtgcttgcgccaatggatggatacaatacgataaacattgttatttagatactaacattaaaatgtctacagataatgcggtttatcagtgtcgtaaattacgagctagattgcctagacctgatactagacatctgagagtattgtttagtattttttataaagattattgggtaagtttaaaaaagaccaatgataaatggttagatattaataatgataaagatatagatattagtaaattaacaaattttaaacaactaaacagtacgacggatgctgaagcgtgttatatatacaagtctggaaaactggttaaaacagtatgtaaaagtactcaatctgtactatgtgttaaaaaattctacaagtgacaacaaaaaatgaattaataataagtcgttaacgtacgccgccatggacgccgcgtttgttattactccaatgggtgtgttgactataacagatacattgtatgatgatctcgatatctcaatcatggactttataggaccatacattataggtaacataaaaactgtccaaatagatgtacgggatataaaatattccgacatgcaaaaatgctactttagctataagggtaaaatagttcctcaggattctaatgatttggctagattcaacatttatagcatttgtgccgcatacagatcaaaaaataccatcatcatagcatgcgactatgatatcatgttagatatagaagataaacatcagccattttatctattcccatctattgatgtttttaacgctacaatcatagaagcgtataacctgtatacagctggagattatcatctaatcatcaatccttcagataatctgaaaatgaaattgtcgtttaattcttcattctgcatatcagacggcaatggatggatcataattgatgggaaatgcaatagtaattttttatcataaaagttgtaaagtaaataataaaacaataaatattgaactagtagtacgtatattgagcaatcagaaatgatgctggtacctcttatcacggtgaccgtagttgcgggaacaatattagtatgttatatattatatatttgtaggaaaaagatacgtactgtctataatgacaataaaattatcatgacaaaattaaaaaagataaagagttctaattccagcaaatctagtaaatcaactgatagcgaatcagactgggaggatcactgtagtgctatggaacaaaacaatgacgtagataatatttctaggaatgagatattggacgatgatagcttcgctggtagtttaatatgggataacgaatccaatgttatggcgcctagcacagaacacatttacgatagtgttgctggaagcacgctgctaataaataatgatcgtaatgaacagactatttatcagaacactacagtagtaattaatgaaacggagactgttgaagtacttaatgaagataccaaacagaatcctaactattcatccaatcctttcgtaaattataataaaaccagtatttgtagcaagtcaaatccgtttattacagaacttaacaataaatttagtgagaataatccgtttagacgagcacatagcgatgattatcttaataagcaagaacaagatcatgaacacgatgatatagaatcatcggtcgtatcattggtgtgattagtttcctttttataaaattgaagtaatatttagtattattgctgccgtcacgttgtacaaatggagatattccctgtattcggcatttctaaaattagcaattttattgctaataatgactgtagatattatatagatacagaacatcaaaaaattatatctgatgagatcaatagacagatggatgaaacggtacttcttaccaacatcttaagcgtagaagttgtaaatgacaatgagatgtaccatcttattcctcatagattatcgacgattatactctgtattagttctgtcggaggatgtgttatctctatagataatgacatcaatggcaaaaatattctaacctttcccattgatcatgctgtaatcatatccccactgagtaaatgtgtcgtagttagcaagggtcctacaaccatattggttgttaaagcggatatacctagcaaacgattggtaacatcgtttacaaacgacatactatatgtaaacaatctgtcactgattaattatttgccgttgtctgtattcattattagacgagtcaccgactatttggatagacacatatgcgatcagatatttgctaataataagtggtattcccttataaccatcgacgataagcaatatcctattccatcaaactgtataggtatgtcctctgccaagtacataaattctagcatcgagcaagatactttaatccatgtttgtaacctcgagcatccgttcgactcagtatacaaaaaaatgcagtcgtacaattctctacctatcaaggaacaaatattgtacggtagaattgataatataaatatgagcattagtatttctgtggattaatagatttctagtatggggatcattaatcatctctaatctctaaatacctcataaaacgaaaaaaaagctattatcaaatactgtacggaatggattcattctcttctctttttatgaaactctgttgtatatctactgataaaactggaagcaaaaaatctgatagaaagaataagaataagatcaaggattatatggaacacgattattataaaataacaatagttcctggttcctcttccacgtctactagctcgtggtattatacacatgcctagtaatagtctctttgcgttgacggaaagcagactagaaataacaggctaaaatgttcagacaccataatagttcccaacccagataataacagagttccatcaacacattcctttaaactcaatcccaaacccaaaaccgttaaaatgtatccggccaattgatagtagataatgaggtgtacagcgcatgataatttacacagtaaccaaaatgaaaatactttagtaattataagaaatatagacggtaatgtcatcatcaacaatccgataatatgcctgagagtaaacattgacggataaaacaaaaatgctccgcataactctatcatggcaataacacaaccaaatacttgtaagattcctaaattagtagaaaatacaacgaatatcgatgtataagtgatctcgagaaataataagaataaagtaatgcccgtaaagataaacatcaacattgtttggtaatcattaaaccaattagtatgaagttgaactaatttcacagtagattttattccagtgttatcctcgcatgtataagtacctggtaagatatctttatattccataatcaatgagacatcactatctgataacgaatgaagtctagcactagtatgccatttacttaatattgtcgtcttggaagttttattataagttaaaatatcatggttatccaatttccatctaatatactttgtcggattatctatagtacacggaataatgatggtatcattacatgctgtatactctatggtctttgtagttgttataacaaccaacgtatagaggtatatcaacgatattctaactcttgacattttttatttatttaaaatgatacctttgttatttattttattctattttgctaacggtattgaatggcataagtttgaaacgagtgaagaaataatttctacttacttattagacgacgtattatacacgggtgttaatggggcggtatacacattttcaaataataaactaaacaaaactggtttaactaataataattatataacaacatctataaaagtagaggatgcggataaggatacattagtatgcggaaccaataacggaaatcccaaatgttggaaaatagacggttcagacgacccaaaacatagaggtagaggatacgctccttatcaaaatagcaaagtaacgataatcagtcacaacggatgtgtactatctgacataaacatatcaaaagaaggaattaaacgatggagaagatttgacggaccatgtggttatgatttattcacggcggataacgtaattccaaaagatggtttacgaggagcattcgtcgataaagacggtacttatgacaaagtttacattcttttcactgatactatcggctcaaagagaattgtcaaaattccgtatatagcacaaatgtgcctaaacgacgaaggtggtccatcatcattgtctagtcatagatggtcgacgtttctcaaagtcgaattagaatgtgatatcgacggaagaagttatagacaaattattcattctagaactataaaaacagataatgatacgatactatatgtattcttcgatagtccttattccaagtccgcattatgtacctattctatgaataccattaaacaatctttttctacgtcaaaattggaaggatatacaaagcaattgccgtctccagctcctggtatatgtttaccagctggaaaagttgttccacataccacgtttgaagtcatagaacaatataatgtactagatgatattataaagcctttatctaaccaacctatcttcgaaggaccgtctggtgttaaatggttcgatataaaggagaaggaaaatgaacatcgggaatatagaatatacttcataaaagaaaattctatatattcgttcgatacaaaatctaaacaaactcgtagctcgcaagtcgatgcgcgactattttcagtaatggtaactgcgaaaccgttatttatagcagatatagggataggagtaggaatgccacaaatgaaaaaaatacttaaaatgtaatcttaatcgagtacaccacacgacaatgaacaaacataagacagattatgctggttatgcttgctgcgtaatatgcggtctaattgtcggaattatttttacagcgacactattaaaagttgtagaacgtaaattagttcatacaccattaatagataaaacgataaaagatgcatatattagagaagattgtcctactgactggataagctataataataaatgtatccatttatctactgatcgaaaaacctgggaggaaggacgtaatgcatgcaaagctctaaattcaaattcggatctaattaagatagagactccaaacgagttaagttttttaagaagccttagacgaggctattgggtaggagaatccgaaatattaaaccagacaaccccatataattttatagctaagaatgccacgaagaatggaactaaaaaacggaaatatatttgtagcacaacgaatactcccaaactgcattcgtgttacactatataacaattacactacatttttatcataccactacttcggttagatgttttagaaaaaaataaatatcgccgtaccgttcttgtttttataaaaataacaattaacaattatcaaattttttctttaatattttacgtggttgaccattcttggtggtaaaataatctcttagtgttggaatggaatgctgtttaatgtttccacactcatcgtatattttgacgtatgtagtcacatcgtttacgcaatagtcagactgtagttctatcatgcttcctacatcagaaggaggaacagttttaaagtctcttggttttaatctattaccgttagttttcatgaaatcctttgttttatccacttcacattttaaataaatgtccactatacattcttttgttaattttactagatcgtcatgggtcatagaatttataggttccgtagtccatggatccaaactagcaaacttcgcgtatacggtatcgcgattagtgtatacaccaactgtatgaaaattaagaaaacagtttaataaatcaacagaaatatttaatcctccgtttgatacagatgcgccatatttatggatttcggattcacacgttgtttgtctgaggtgttcgtctagtgttgcttctacgtaaacttcgattcccatatattctttattgtcagaatcgcataccgatttatcatcatacactgtttgaaaactaaatggtatacacatcaaaataataaataataacgagtacattctgcaatattgttatcgtaattggaaaaatagtgttcgagtgagttggattatgtgagtattggattgtatattttattttatattttgtaataagaataaaatgctaatgtcaagtttattccaatagatgtcttattaaaaacatatataataaataacaatggctgaatggcataaaattatcgaggatatctcaaaaaataataagttcgaggatgccgccatcgttgattacaagactacaaagaatgttctagctgctattcctaacagaacatttgccaagattaatccgggtgaaattattcctctcatcactaatcgtaatattctaaaacctcttattggtcagaaatattgtattgtatatactaactctctaatggatgagaacacgtatgctatggagttgcttactgggtacgcccctgtatctccgatcgttatagcgagaactcataccgcacttatatttttgatgggtaagccaacaacatccagacgtgacgtgtatagaacgtgtagagatcacgctacccgtgtacgtgcaactggtaattaaaataaaaagtaatattcatatgtagtgtcaattttaaatgatgatgatgaaatggataatatccatattgacgatgtcaataatgccggtattggcatacagttcatcgatttttagatttcattcagaggatgtggaattatgttatgggcatttgtattttgataggatctataatgtagtaaatataaaatataatccgcatattccatatagatataattttattaatcgcacgttaaccgtagatgaactagacgataatgtcttttttacacatggttattttttaaaacacaaatatggttcacttaatcctagtttgattgtctcattatcaggaaacttaaaatataatgatatacaatgctcagtaaatgtatcgtgtctcattaaaaatttggcaacgagtacatctactatattaacatctaaacataagacttattctctacatcggtccacgtgtattactataataggatacgattctattatatggtataaagatataaatgacaagtataatgacatctatgattttactgcaatatgtatgctaatagcgtctacattgatagtgaccatatacgtgtttaaaaaaataaaaatgaactcttaattatgctatgctattagaaatggataaaatcaaaattacggttgattcaaaaattggtaatgttgttaccatatcgtataacttggaaaagataactattgatgtcacacctaaaaagaaaaaagaaaaggatgtattattagcgcaatcagttgctgtcgaagaggcaaaagatgtcaaggtagaagaaaaaaatattatcgatattgaagatgacgatgatatggatgtagaaagcgcgtaatacgatctataaaaataagtatataaatactttttatttactgtactcttactgtgtagtggtgataccctactcgattatttttttaaaaaaaaaatacttattctgattcttctagccatttccgtgttcgtttgaatgccacatcgacgtcaaagataggggagtagttgaaatctagttctgcattgttggtacgcacctcaaatgtagtgttggatatcttcaacgtatagttgttgagtagtgatggttttctaaatagaattctcttcatatcattcttgcacgcgtacatttttagcatccatcttggaatcctagatccttgttctattcccaatggtttcatcaatagaagattaaacatatcgtacgaacacgatggagagtaatcgtagcaaaagtaagcatttcctttaatcttagatcccggatactggatatattttgcagccaacacgtgcatccatgcagcatttcctacatatacccggctatgcaccgcgtcatcatcgactgtacgatacataatgttaccgtgttgcttacattgctcgtaaaagactttcatcaatttgtctccttctccgtaaattccagtgggtcttaggcaacaagtatacaattttgctccattcatgattacggaattattggctttcataaccagttgctcggccatacgtttactttttgcgtatacatgtcctggtgatatatcataaagggtatgctcatggccgatgaatggatcaccgtgtttattgggtcctattgcttccatgctactagtatagatcaaatacttgattcctaggtccacacaagctgccaaaatagtctgtgttccataatagtttactttcatgatttcattatcggtgtattttccaaatacatccactagagcagccgtatgaataatcagatttaccccatctagcgcttctctcaccttatcaaagtcgtttatatcacattgtatatagtttataaccttaactttcgaggttattggttgtggatcttctacaatatctatgactctgatttcttgaacatcatctgcactaattaacagttttactatatacctgcctagaaatccggcaccaccagtaaccgcgtacacggccattgctgccactcataatatcagactacttattctattttactaaataatggctgtttgtataatagaccacgataatatcagaggagttatttactttgaaccagtccatggaaaagataaagttttaggatcagttattggattaaaatccggaacgtatagtttgataattcatcgttacggagatattagtcaaggatgtgattccataggcagtccagaaatatttatcggtaacatctttgtaaacagatatggtgtagcatatgtttatttagatacagatgtaaatatatttacaattattggaaaggcgttatctatttcaaaaaatgatcagagattagcgtgtggagttattggtatttcttacataaatgaaaagataatacattttcttacaattaacgagaatggcgtttgatatatcagttaatgcgtctaaaacaataaatgcattagtttacttttctactcagcaaaataaattagtcatacgtaatgaagttaatgatacacactacactgtcgaatttgatagggacaaagtagttgacacgtttatttcatataatagacataatgacaccatagagataagaggggtgcttccagaggaaactaatattggttgcgcggttagtatgacttacttgtataataagtatagttttaaactgattttagcagaatatataagacacagaaatactatatccggcaatatttattcggcattgatgacactagatgatttggctattaaacagtatggagacattgatctattatttaatgagaaacttaaagtagactccgattcgggactatttgactttgtcaactttgtaaaggatatgatatgttgtgattctagaatagtagtagctctatctagtctagtatctaaacattgggaattgacaaataaaaaatataggtgtatggcattagccgaacatatatctgatagtattccaatatctgagctatctagactacgatacaatctatgtaagtatctacgcggacacactgagagcatagaggataaatttgattattttgaagacgatgattcgtctacatgttctgccgtaaccgacagggaaacggatgtataattttttttatagcgtgaaggatatgataaaaaatataattgttgtatttatcccattccaatcaccttatatgattctgtaacacaataaaggagtcttatagatgtatagaggtcagatactggtttgataaactgtttattccacataagtatgtttgactttatggttagacccgcatactttaacaaatcactgaaaattggagttaggtattgacctctcagaatcagttgccgttctggaacattaaatgtattttttatgatatactccaacgcatttatgtgggcatacaacaagtcattactaatggaatattccaagagttttagttgtctagtatttaacaagagaagagatttcaacagactgtttatgaactcgaatgccgcctcattgtcgcttatattgatgatgtcgaattctcccaatatcatcaccgatgagtagctcatcttgttatcgggatccaagttttctaaagatgtcattaaaccctcgatcatgaatggatttatcatcatcgtttttatgttggacatgagcttagtccgtttgtccacatctatagaagatgatttctgaattatttcatatatctctctctttaactccaggaacttgtcaggatggtctactttaatatgttctcgtctaagagatgaaaatctttggatggttgcacgcgacttttctctaaaggatgacgttgcccaagatcctctcttaaatgaatccatcttatccttggacaagatggacagtctattttccttagatggtttaatatttttgttacccatgatctataaaggtagacctaatcgtctcggatgaccatatatttattttcagttttattatacgcataaattgtaaaaaatatgttaggtttacgaaaatgtctcgtggggcattaatcgtttttgaaggattggacaaatctggaaaaacaacacaatgtatgaacatcatggaatcaataccttcaaacacaataaaataccttaactttcctcagagatccactgtcactggaaagatgatagatgactatctaactcgtaaaaaaacctataatgatcatatagttaatctattattttgtgcaaatagatgggagtttgcatcttttatacaagaacaactagaacagggaattactttaatagttgatagatacgcattttctggagtagcgtatgccgccgctaaaggcgcgtcaatgactctcagtaagagttatgaatctggattgcctaaacccgacttagttatattcttggaatctggtagcaaagaaattaatagaaacgtcggtgaggaaatttatgaagatgttacattccaacaaaaggtattacaagaatataaaaaaatgattgaagaaggagatattcattggcaaattatttcttctgaattcgaggaagatgtaaagaaggagttgattaagaatatagttatagaggctatacacacggttactggaccagtggggcaactgtggatgtaatagtgaaattacattttttataaatagatgttagtacagtgttataaatggatgaagcatattactctggcaacttggaatcagtactcggatacgtgtccgatatgcataccgaactcgcatcaatatctcaattagttattgccaagatagaaactatagataatgatatattaaacaaggacattgtaaattttatcatgtgtagatcaaacttggataatccatttatctctttcctagatactgtatatactattatagatcaagagaactatcagactgagttgattaattcattagacgacaatgaaattatcgattgtatagttaataagtttatgagcttttataaggataacctagaaaatatagtagatgctatcattactctaaaatatataatgaataatccagattttaaaactacgtatgccgaagtactcggttccagaatagccgatatagatattaaacaagtgatacgtaagaatatactacaattgtctaataatatccgcgaacgatatttgtgaaaatattaaaaaaaaatactttttttattaaatgacgtcttttcgtgaatttagaaaattatgctgtgctatatatcacgcatcaggatataaagaaaaatctaaattaattagagactttataacagatagggatgataaatatttgatcattaagctattgcttcccggattagacgatagaatttataacatgaacgataaacaaattataaaattatatagtataatatttaaacaatctcaggaagatatgctacaagatttaggatacggatatataggagacactattaggactttcttcaaagagaacacagaaatccgtccacgagataaaagcattttaactttagaagaagtggatagttttttaactacgttatcatccgtaactaaagaatcgcatcaaataaaattattgactgatgtagcatctgtttgtacatgtaatgatttaaaatgtgtagtcatgcttattgataaagatctaaaaattaaagcgggtcctcggtacgtacttaacgctattagtcctaatgcctatgatgtgtttagaaaatctaataacttgaaagagataatagaaaattcatctaaacaaaatctagactctatatctatttctgttatgactccaattaatcccatgttagcggaatcgtgtgattctgtcaataaggcgtttaaaaaatttccatcaggaatgtttgcggaagtcaaatacgatggtgaaagagtacaagttcataaaaataataacgagtttgccttctttagtagaaacatgaaaccagtactctctcataaagtggattatctcaaagaatacataccgaaagcatttaaaaaagctacgtctatcgtattggattctgaaattgttcttgtagacgaacataatgtaccgctcccgtttggaagtttaggtatacacaaaaagaaagaatataaaaactctaacatgtgtttgttcgtgtttgactgtttgtactttgatggattcgatatgacggacattccattgtacgaacgaagatcttttctcaaagatgttatggttgaaatacccaatagaatagtattctcagagttgacgaatattagtaacgagtctcagttaactgacgtattggatgatgcactaacgagaaaattagaaggattggtcttaaaagatattaatggagtatacgaaccgggaaagagaagatggttaaaaataaagcgagactatttgaacgagggttccatggcagattctgccgatttagtagtactaggtgcctactatggtaaaggagcaaagggtggtatcatggcagtctttctaatgggttgttacgacgatgaatccggtaaatggaagacggttaccaagtgttcaggacacgatgataatacgttaagggagttgcaagaccaattaaagatgattaaaattaacaaggatcccaaaaaaattccagagtggttagtagttaataaaatctatattcccgattttgtagtagaggatccgaaacaatctcagatatgggaaatttcaggagcagagtttacatcttccaagtcccataccgcaaatggaatatccattagatttcctagatttactaggataagagaggataaaacgtggaaagaatctactcatctaaacgatttagtaaacttgactaaatcttaatagttacatacaaactgaaaattaaaataacactatttagttggtggtcgccatggatggtgttattgtatactgtctaaacgcgctagtaaaacatggcgaggaaataaatcatataaaaaatgatttcatgattaaaccatgttgtgaaagagtttgtgaaaaagtcaagaacgttcacattggcggacaatctaaaaacaatacagtgattgcagatttgccatatatggataatgcggtatccgatgtatgcaattcactgtataaaaagaatgtatcaagaatatccagatttgctaatttgataaagatagatgacgatgacaagactcctactggtgtatataattattttaaacctaaagatgccattcctgttatcatatctataggaaaggataaagatgtctgtgaactattaatctcatcagacatatcgtgtgcatgcgtggagttaaattcatatcacgtagccattcttcccatggatgtttccttttttaccaaaggaaatgcatcattgattattctcctgtttgatttctctatcgatgcggcacctctcttaagaagtgtaaccgataataatgttattatatctagacaccagcgtctacatgacgagcttccgagttccaattggttcaagttttacataagtataaagtccgactattgttctatattatatatggttgttgatggatctgtgatgcatgcgatagctgataatagaactcacgcaattattagcaaaaatatattagacaatactacgattaacgatgagtgtagatgctgttattttgaaccacagattaggattcttgatagagatgagatgctcaatggatcatcgtgtgatatgaacagacattgtattatgatgaatttacctgatgtaggcgaatttggatctagtatgttggggaaatatgaacctgacatgattaagattgctctttcggtggctggtaatttaataagaaatcgagactacattcccgggagacgaggatatagctactacgtttacggtatagcctctagataatttttttaagcacgaaataaaaaacataattttaaaccaatctatttcatactattttgtgtgatcaccatggacataaagatagatattagtatttctggtgataaatttacggtgactactaggagggaaaatgaagaaagaaaaaaatatctacctctccaaaaagaaaaaactactgatgttatcaaacctgattatcttgagtacgatgacttgttagatagagatgagatgtttactattctagaggaatattttatgtacagaggtctattaggcctcagaataaaatatggacgactctttaacgaaattaaaaaattcgacaatgatgcggaagaacaattcggtactatagaagaactcaagcagaaacttagattaaattctgaagagggagcagataactttatagattatataaaggtacaaaaacaggatatcgtcaaacttactgtatacgattgcatatctatgataggattgtgtgcatgcgtggtagatgtttggagaaatgagaaactgttttctagatggaaatattgtttacgagcgattaaactgtttattgatgatcacatgcttgataagataaaatctatactgcagaatagactagtatatgtggaaatgtcatagaaagttaaaagttaatgagagcaaaaatatataaggttgtattccatatttgttatttttttctgtaatagttagaaaaatacattcgatggtctatctatcagattattatgtgttataaggtactttttctcataataaactagagtatgagtaagatagtgtttttcaaaacatataaatctaaaattgatggatgagatatacagctattaatttcgaaaatatattttaatctgataactttaaacatggatttttaatggtggtttaacgttttaaaaaaagattttgttattgtagtatatgataatattaaaagatggatataaagaatttgctgactgcatgtactattttttacattactacattggctacggcagatatacctacttcgtcactgccacacgctccggtaaacggggcatgtgacgagggagaatatcttgataagaggcataatcaatgttgtaatcagtgtccacctggagaatttgccaaggttagatgtaatggtaacgataacacaaaatgtgaacgctgcccacctcatacatataccgcaatccccaattactctaatggatgtcatcaatgtagaaaatgcccaacaggatcatttgataaggtaaagtgtaccggaacacagaacagtaaatgttcgtgtcttcctggttggtattgcgctactgattcttcacagactgaagattgtcgagattgtataccaaaaaggagatgtccatgcggatactttggtggaatagatgaacaaggaaatcctatttgtaaatcgtgttgtgttggtgaatattgcgactacctacgtaattatagacttgatccatttcctccatgcaaactatctaaatgtaattaattatgattttgatgataatgttaccatacattatatcgctacttggttagtgtattattcagtatgaagacctattaataattacttatcttttgacgatcttgttataattataatataaaaatacttatggcatagtaactcataattgctgacgcgataaattcgtaataatctgttttgttcaaatttttataaggaatctacaggcataaaaataaaaatataatttataatatactcttacagcgcgccatcatgaataacagcagtgaattgattgctgttattaatggatttagaaatagtggacgattttgtgatattaatatagttattaatgatgaaaggataaacgctcacagactcatcctatctggagcctccgaatatttttccattctgttttccaataattttatcgattctaatgaatacgaagttaatctaagtcatttagattatcaaagtgttaacgatttgatcgattacatttatgggatacctttgagcctaactaacgataacgtgaaatatattctttcaaccgctgattttttacaaattggatctgctattacggagtgtgaaaattacatacttaaaaatctttgttctagaaactgtatcgatttctacatatacgctgataaatataataacaagaaaatagaatcagcgtcgtttaacacaatattacaaaatattttgagactcatcaacgatgaaaactttaaatacttaacagaggaatcaatgataaaaattttaagcgatgatatgttaaatataaaaaatgaggatttcgccccactaattctcattaaatggttagagagtactcaacaaccatgcaccgtcgagttacttaaatgcctcagaatatcattgctttccccacaagttataaaatcactttatagtcatcgactggttagttcaatctacgaatgtataacattcttaaacaatatagcattcttggatgaatcatttcctagataccatagcatcgagttgatatctatcggtataagtaattcgcatgataagatttccataaactgctacaatcataaaaaaaatacatgggaaatgatatcttcacgtagatataggtgtagtttcgcagtggccgtcctggataatattatctatatgatgggtggatatgatcagtccccgtatagaagttcaaaggttatagcgtacaatacatgtacaaattcttggatatatgatataccagagctaaaatatcctcgttctaattgtgggggactggctgatgacgaatacatttattgtataggcggcatacgcgatcaggattcatcgttgacatctagtattgatagatggaagccatcaaaaccatattggcagaagtatgctaaaatgcgcgaaccaaaatgtgatatgggggttgcgatgttaaacggattaatatatgttataggtggaatcgttaaaggtgacacgtgtaccgacgcactagagagtttatcagaagatggatggatgaagcatcaacgtcttccaataaaaatgtccaatatgtcgacgattgttcatgatggcaagatttatatatctggaggttacaacaatagtagtgtagttaatgtaatatcgaatctagtccttagctataattcgatatatgatgaatggaccaaattatcatcattaaacattcctagaattaatcccgctctatggtcagcgcataataaattatatgtaggaggaggaatatctgatgatgttcgaactaatacatctgagacatacgacaaagaaaaagattgttggacattggataatggtcacgtgttaccacgcaattatataatgtataaatgcgaaccgattaaacataaatatccattggaaaaaacacagtacacgaatgattttctaaagtatttggaaagttttataggtagttgatagaacaaaatacataattttgtaaaaataaatcactttttatactaatatgacacgattaccaatacttttgttactaatatcattagtatacgctacaccttttcctcagacatctaaaaaaataggtgatgatgcaactctatcatgtaatcgaaataatacaaatgactacgttgttatgagtgcttggtataaggagcccaattccattattcttttagctgctaaaagcgacgtcttgtattttgataattataccaaggataaaatatcttacgactctccatacgatgatctagttacaactatcacaattaaatcattgactgctagagatgccggtacttatgtatgtgcattctttatgacatcaactacaaatgacactgataaagtagattatgaagaatactccacagagttgattgtaaatacagatagtgaatcgactatagacataatactatctggatctacacattcaccggaaactagttctgagaaacctgattatatagataattctaattgctcgtcggtattcgaaatctaagctcttttttttttttttttttttggcatataaataagtcgaccaccatggtgggtgaggatagcgtgctgatcaccgagaacatgcacatgaaactgtacatggagggcaccgtgaacgaccaccacttcaagtgcacatccgagggcgaaggcaagccctacgagggcacccagaccatgaagatcaaggtggtcgagggcggccctctccccttcgccttcgacatcctggctaccagcttcatgtacggcagcaaaacctttatcaaccacacccagggcatccccgacttctttaagcagtccttccctgagggcttcacatgggagaggatcaccacatacgaagacgggggcgtgctgaccgctacccaggacaccagcctccagaacggctgcctcatctacaacgtcaagatcaacggggtgaacttcccatccaacggccctgtgatgcagaagaaaacactcggctgggaggccagcaccgagatgctgtaccccgctgacagcggcctgagaggccatagccagatggccctgaagctcgtgggcgggggctacctgcactgctccctcaagaccacatacagatccaagaaacccgctaagaacctcaagatgcccggcttctacttcgtggacaggagactggaaagaatcaaggaggccgacaaagagacctacgtcgagcagcacgagatggctgtggccaggtactgcgacctgcctagcaaactggggcacagctgattaattaatttttatcgatctaattcaacaatgtctggagagcttcgcaggatcccgactccggaaccaattactgataaagaagatcatacagttacagacactgtctcatacactacagtaagtacatcatctggaattgtcactactaaatcaaccaccgatgatgcggatctttatgatacgtacaatgataatgatacagtaccaccaactactgtaggcggtagtacaacctctattagcaattataaaaccaaggactttgtagaaatatttggtattaccgcattaattatattgtcggccgtggcaattttctgtattacatattatatatataataaacgttcacgtaaatacaaaacagagaacaaagtctagatttttgacttacataaatgtctgggatagtaaaatctatcatattgagcggaccatctggtttaggaaagacagccatagccaaaagactatgggaatatatttggatttgtggtgtcccataccactagatttcctcgtcctatggaacgagaaggtgttgattaccattacgttaacagagaggccatctggaagggaatagccgccggaaactttctagaacatactgagtttttaggaaatatttacggaacttctaaaacagctgtgaatacagcggctattaataatcgtatttgtgtgatggatctaaacatcgacggtgttagaagtcttaaaaatacgtacctaatgccttactcggtgtatataagacctacctctcttaaaatggttgagaccaagcttcgtcgtagaaacactgaagctaacgatgagattcatcgtcgtgtgatgttggcaaaaactgacatggatgaggcaggtgaagccggtctattcgacactattatcattgaagatgatgtgaatttagcatatagtaagttaattcagatactacaggaccgtattagaatgtattttaacactaattagagacttaagacttaaaacttgataattaataatataactcgtttttatatgtgtctatttcaacgtctaatgtattagttaaatattaaaacttaccacgtaaaacttaaaatttaaaatgatatttcattgacagatagatcacacattatgaactttcaaggacttgtgttaactgacaattgcaaaaatcaatgggtcgttggaccattaataggaaaaggtggattcggtagtatttatactactaatgacaataattatgtagtaaaaatagagcccaaagctaacggatcattatttaccgaacaggcattttatactagagtacttaaaccatccgttatcgaagaatggaaaaaatctcacaatataaagcacgtaggtcttatcacgtgcaaggcatttggtctatacaaatccattaatgtggaatatcgattcttggtaattaatagattaggtgcagatctagatgcggtgatcagagccaataataatagactaccaaaaaggtcggtgatgttgatcggaatcgaaatcttaaataccatacaatttatgcacgagcaaggatattctcacggagatattaaagcgagtaatatagtcttagatcaaatagataagaataaattatatctagtggattacggattggtttctaaattcatgtctaatggcgaacatgttccatttataagaaatccaaataaaatggataacggtactctagaatttacacctatagattcgcataaaggatacgttgtatctagacgtggagatctagaaacacttggatattgtatgattagatggttgggaggtatcttaccatggactaagatatctgaaacaaagaattgtgcattagtaagtgccacaaaacagaaatatgttaacaatactgcgactttgttaatgaccagtttgcaatatgcacctagagaattgctgcaatatattaccatggtaaactctttgacatattttgaggaacccaattacgacaagtttcggcacatattaatgcagggtgtatattattaagtgtggtgtttggtcgataaaaattaaaaaataacttaatttattattgatctcgtgtgtacaaccgaaatcatggcgatgttttacgcacacgctctcggtgggtacgacgagaatcttcatgcctttcctggaatatcatcgactgttgccaatgatgtcaggaaatattctgttgtgtcagtttataataacaagtatgacattgtaaaagacaaatatatgtggtgttacagtcaggtgaacaagagatatattggagcactgctgcctatgtttgagtgcaatgaatatctacaaattggaaatccgatccatgatcaagaaggaaatcaaatctctatcatcacatatcgccacaaaaactactatgctctaagcggaatcgggtacgagagtctagacttgtgtttggaaggagtagggattcatcatcacgtacttgaaacaggaaacgctgtatatggaaaagttcaacatgattattctactatcaaagagaaggccaaagaaatgagtgcacttagtccaggacctatcatcgattaccacgtctggataggagattgtatctgtcaagttactgctgtggacgtacatggaaaggaaattatgaaaatgagattcaaaaagggtgcggtgcttccgatcccaaatctggtaaaagttaaacttggggagaatgatacagaaaatctttcttctactatatcggcggcaccatcgaggtaaccacctctctggaagacagcgtgaatcatgtactcatgaaacgtttggaaactatacgccatatgtggtctgttgtatatgatcattttgatattgtgaatggtaaagaatgctgttatgtgcatacgcattcatctaatcaaaatcctataccgagtactgtaaaaacaaatttgtacatgaagactatgggatcatgcattcaaatggattccatggaagctctagagtatcttagcgaactgaaggaatcaggtggatggagtcccagaccagaaatgcaggaatttgaatatccagatggagtggaagacactgaatcaattgagagattggcagaggagttcttcaatagatcagaacttcaggctggtgaatcagtcaaatttggtaattctattaattgttaaacatacatctgtttcagctaagcaactaagaacacgtatacggcagcagcttccttctatactctcatcttttaccaacacaaagggtggatatttgttcattggagttgataataatacacacaaagtatttggattcacggtgggttacgactacctcagactgatagagaatgatatagaaaagcatatcaaaagacttcgtgttgtgcatttctgtgagaagaaagaggacatcaagtacgcgtgtcgattcatcaaggtatataaacctggggatgagactacctcgacatacgtgtgcgctatcaaagtggaaagatgctgttgtgctgtgtttgcagattggccagaatcatggtatatggatactaatggtatcaagaagtattctccagatgaatgggtgtcacatataaaattttaattaatgtaactatagagaacaaataataaggttgtaatatcatatagacaataactaacaattaattagtaactgttatctcttttttaactaaccaactaactatatacctattaatacatcgtaattatagttcttaacatctattaatcattaattcgcttctttaattttttataaactaacattgttaattgaaaagggataacatgttacagaatataaattatatatggatttttttaaaaaggaaatacttgactggagtatatatttatctcttcattatatagcacgcgtgttttccaatttttccacatcccatataatacaggattataatctcgttcgaacatacgagaaagtggataaaacaatagttgattttttatctaggttgccaaatttattccatattttagaatatggggaaaatattctacatatttattctatggatgatgctaatacgaatattataattttttttctagatagagtattaaatattaataagaacgggtcatttatacacaatctcgggttatcatcatccattaatataaaagaatatgtatatcaattagttaataatgatcatccagataataggataagactaatgcttgaaaatggacgtagaacaagacattttttgtcctatatatcagatacagttaatatctatatatgtattttaataaatcatggattttatatagatgccgaagacagttacggttgtacattattacatagatgtatatatcactataagaaatcagaatcagaatcatacaatgaattaattaagatattgttaaataatggatcagatgtagataaaaaagatacgtacggaaacacaccttttatcctattatgtaaacacgatatcaacaacgtggaattgtttgagatatgtttagagaatgctaatatagactctgtagactttaatagatatacacctcttcattatgtctcatgtcgtaataaatatgattttgtaaagttattaatttctaaaggagcaaatgttaatgcgcgtaataaattcggaactactccattttattgtggaattatacacggtatctcgcttataaaactatatttggaatcagacacagagttagaaatagataatgaacatatagttcgtcatttaataatttttgatgctgttgaatctttagattatctattatccagaggagttattgatattaactatcgtactatatacaacgaaacatctatttacgacgctgtcagttataatgcgtataatacgttggtctatctattaaacaaaaatggtgattttgagacgattactactagtggatgtacatgtatttcggaagcagtcgcaaacaacaacaaaataataatggaagtactattgtctaaacgaccatctttgaaaattatgatacagtctatgatagcaattactaaacataaacagcataatgcagatttattgaaaatgtgtataaaatatactgcgtgtatgaccgattatgatactcttatagatgtacagtcgctacagcaatataaatggtatattttaagatgtttcgatgaaatagatatcatgaagagatgttatataaaaaataaaactgtattccaattagttttttgtatcaaagacattaatactttaatgagatacggtaaacatccttctttcgtgaaatgcactagtctcgacgtatacggaagtcgtgtacgtaatatcatagcatctattagatatcgtcagagattaattagtctattatccaagaagctggatcctggagataaatggtcgtgttttcctaacgaaataaaatataaaatattggaaaactttaacgataacgaactatccacatatctaaaaatcttataaacattattaaaatataaaatctaagtaggataaaatcacactacatcattgtttccttttagtgctcgacagtgtatactatttttaacgctcataaataaaaatgaaaacgatttccgttgttacgttgttatgcgtactacctgctgttgtttattcaacatgtactgtacccactatgaataacgctaaattaacgtctaccgaaacatcgtttaatgataaccagaaagttacgtttacatgtgatcagggatatcattctttggatccaaatgctgtctgtgaaacagataaatggaaatacgaaaatccatgcaaaaaaatgtgcacagtttctgattatgtctctgaactatataataaaccgctatacgaagtgaattccaccatgacactaagttgcaacggcgaaacaaaatattttcgttgcgaagaaaaaaatggaaatacttcttggaatgatactgttacgtgtcctaatgcggaatgtcaacctcttcaattagaacacggatcgtgtcaaccagttaaagaaaaatactcatttggggaatatatgactatcaactgtgatgttggatatgaggttattggtgcttcgtacataagttgtacagctaattcttggaatgttattccatcatgtcaacaaaaatgtgatatgccgtctctatctaacggattaatttccggatctacattttctatcggtggcgttatacatcttagttgtaaaagtggttttacactaacggggtctccatcatccacatgtatcgacggtaaatggaatcccatactcccaatatgtgtacgaactaacgaaaaatttgatccagtggatgatggtcccgacgatgagacagatttgagcaaactctcgaaagacgttgtacaatatgaacaagaaatagaatcgttagaagcaacttatcatataatcatagtggcgttgacaattatgggcgtcatatttttaatctccgttatagtattagtttgttcctgtgacaaaaataatgaccaatataagttccataaattgctaccgtaaatataaatccgttaaaataattaataatttaataacaaacaagtatcaaaagattaaagacttatagctagaatcaattgagatgtcttcttcagtggatgttgatatctacgatgccgttagagcatttttactcaggcactattataacaagagatttattgtgtatggaagaagtaacgccatattacataatatatacaggctatttacaagatgcgccgttataccgttcgatgatatagtacgtactatgccaaatgaatcacgtgttaaacaatgggtgatggatacacttaatggtataatgatgaatgaacgcgatgtttctgtaagcgttggcaccggaatactattcatggaaatgtttttcgattacaataaaaatagtatcaacaatcaactaatgtatgatataattaatagcgtatctataattctagctaatgagagatatagaagcgcttttaacgacgatggtatatacatccgtagaaatatgattaacaagttgtacggatacgcatctctaactactattggcacgatcgctggaggtgtttgttattatctgttgatgcatctagttagtttgtataaataattatttcaatatactagttaaaattttaagattttaaatgtataaaaaactaataacgtttttatttgtaataggtgcattagcatcctattcgaataatgagtacactccgtttaataaactgagtgtaaaactctatatagatggagtagataatatagaaaattcatatactgatgataataatgaattggtgttaaattttaaagagtacacaatttctattattacagagtcatgcgacgtcggatttgattccatagatatagatgttataaacgactataaaattattgatatgtataccattgactcgtctactattcaacgcagaggtcacacgtgtagaatatctaccaaattatcatgccattatgataagtacccttatattcacaaatatgatggtgatgagcgacaatattctattactgcagagggaaaatgctataaaggaataaaatatgaaataagtatgatcaacgatgatactctattgagaaaacatactcttaaaattggatctacttatatatttgatcgtcatggacatagtaatacatattattcaaaatatgatttttaaaaatttaaaatatattatcacttcagtgacagtagtcaaataacaaacaacaccatgagatatattataattctcgcagttttgttcattaatagtatacatgctaaaataactagttataagtttgaatccgtcaattttgattccaaaattgaatggactggggatggtctatacaatatatcccttaaaaattatggcatcaagacgtggcaaacaatgtatacaaatgtaccagaaggaacatacgacatatccgcatttccaaagaatgatttcgtatctttctgggttaaatttgaacaaggcgattataaagtggaagagtattgtacgggactatgcgtcgaagtaaaaattggaccaccgactgtaacattgactgaatacgacgaccatatcaatttgtacatcgagcatccgtatgctactagaggtagcaaaaagattcctatttacaaacgcggtgacatgtgtgatatctacttgttgtatacggctaacttcacattcggagattctaaagaaccagtaccatatgatatcgatgactacgattgcacgtctacaggttgcagcatagactttgtcacaacagaaaaagtgtgcgtgacagcacagggagccacagaagggtttctcgaaaaaattactccatggagttcgaaagtatgtctgacacctaaaaagagtgtatatacatgcgcaattagatccaaagaagatgttcccaatttcaaggacaaaatggccagagttatcaagagaaaatttaatacacagtctcaatcttatttaactaaatttctcggtagcacatcaaatgatgttaccacttttcttagcatgcttaacttgactaaatattcataactaatttttattaatgatacaaaaacgaaataaaactgcatattatacactggttaacgcccttataggctctaaccattttcaagatgaggtccctgattatagtccttctgttcccctctatcatctactccatgtctattagacgatgtgagaagactgaagaggaaacatggggattgaaaatagggttgtgtataattgccaaagatttctatcccgaaagaactgattgcagtgttcatctcccaactgcaagtgaaggattgataactgaaggcaatggattcagggatatacgaaacaccgataaattataaaaaaagcaatgtgtccgctgtttccgttaataatactattttcgtaactggcggattattcataaataactctaatagcacgatcgtggttaacaatatggaaaaacttgacatttataaagacaaacaatggtcgattatagaaatgcctatggctagggtatatcacggcattgactcgacatttggaatgttatattttgccggaggtctatccgttaccgaacaatatggtaatttagagaaaaacaacgagatatcttgttacaatcctagaacgaataagtggtttgatatttcatatactatttataagatatccatatcatcattgtgtaaactaaataacgtcttctatgtatttagtaaggacattggatatgtggaaaagtatgatggtgcatggaagttagtacatgatcgtctccccgctataaaggcattatcaacttctccttattgattgaaaatgaaaatataaatagtttttatgtatagcagtattaccctatagttttattgcttactactaacatggatacagatgttacaaatgtagaagatatcataaatgaaatagatagagagaaagaagaaatactaaaaaatgtagaaattgaaaataataaaaacattaacaagaatcatcccaatgaatatattagagaagcactcgttattaataccagtagtaatagtgattccattgataaagaagttatagaatgtatcagtcacgatgtaggaatatagatcatatctactaatttttataatcgatacaaaacataaaaaacaactcgttattacatagcaggcatggaatccttcaagtattgttttgataacgatggcaagaaatggattatcggaaatactttatattctggtaattcaatactctataaggtcagaaaaaatttcactagttcgttctacaattacgtaatgaagatagatcacaaatcacacaagccattgttgtctgaaatacgattctatatatctgtattggatcctttgactatcgacaactggacacgggaacgtggtataaagtatttggctattccagatctgtatggaattggagaaaccgatgattatatgttcttcgttataaagaattcgggaagagtattcgccccaaaggatactgaatcagtcttcgaagcatgcgtcactatgataaacacgttagagtttatacactctcgaggatttacccatggaaaaatagaaccgaggaatatactgattagaaataaacgtctttcactaattgactattctagaactaacaaactatacaagagtggaaactcacatatagattacaacgaggacatgataacttcaggaaatatcaattatatgtgtgtagacaatcatcttggagcaacagtttcaagacgaggagatttagaaatgttgggatattgcatgatagaatggttcggtggcaaacttccatggaaaaacgaaagtagtataaaagtaataaaacaaaaaaaagaatataaaaaatttatagctactttctttgaggactgttttcctgaaggaaatgaacctctggaattagttagatatatagaattagtatacacgttagattattctcaaactcctaattatgacagactacgtaaactgtttatacaagattgaaattatattcttttttttatagagtgtggtagtgttacggatatctaatattaatattagactatctctatcgcgctacacgaccaatatcgattactatggatatcttctatgaaaggagagaatgtatttatttctccagcgtcaatctcgtcagtattgacaatactgtattatggagctaatggatccactgctgaacagctatcaaaatatgtagaaacggaggagaacacggataaggttagcgctcagaatatctcattcaaatccatgaataaagtatatgggcgatattctgccgtgtttaaagattcctttttgagaaaaattggcgataagtttcaaactgttgacttcactgattgtcgcactatagatgcaatcaacaagtgtgtagatatctttactgaggggaaaatcaatccactattggatgaaccattgtctcctagcaattagtgccgtatactttaaagcaaaatggttgacgccattcgaaaaggaatttaccagtgattatcccttttacgtatctccgacggaaatggtagacgtaagtatgatgtctatgtacggcaaggcatttaatcacgcatctgtaaaagaatcattcggcaacttttcaatcatagaactgccatatgttggagatactagtatgatggtcattcttccagacaagattgatggattagaatccatagaacaaaatctaacagatacaaattttaagaaatggtgtgactttatggatgctatgtttatagatgttcacattcccaagtttaaggtaacaggctcgtataatctggtggatactctagtaaagtcaggactgacagaggtgttcggttcaactggagattatagcaatatgtgtaatttagatgtgagtgtcgacgctatgatccacaaaacgtatatagatgtcaatgaagagtatacagaagcagctgcagcaacttctgtactagtggcagactgtgcatcaacaattacaaatgagttctgtgcagatcatccgttcatctatgtgattaggcatgttgatggaaaaattcttttcgttggtagatattgctctccgacaactaattgttaaccattttttttaaaaaaaatagaaaaaacatgtggtattagtgcaggtcgttgttcttccaattgcaattggtaagatgacggccaactttagtacccacgtcttttcaccacagcactgtggatgtgacagactgaccagtattgatgacgtcaaacaatgtttgactgaatatatttattggtcgtcctatgcataccgcaacaggcaatgcgctggacaattgtattccacactcctctcttttagagatgatgcggaattagtgttcatcgacattcgcgagctggtaaaaaatatgccgtgggatgatgtcaaagattgtacagaaatcatccgttgttatataccggatgagcaaaaaaccatcagagagatttcggccatcatcggactttgtgcatatgctgctacttactggggaggtgaagaccatcccactagtaacagtctgaacgcattgtttgtgatgcttgagatgctaaattacgtggattataacatcatattccggcgtatgaattgatgagttgtacatcttgacattttctttcttctcttctccctttcttctcttctcccttcctccctcttctccctttcccagaaacaaacttttttacccactataaaataaaatgagtatactacctattatatttcttcctatatttttttattcttcattcgttcagacttttaacgcgtctgaatgtatcgacaaagggcaatattttgcatcattcatggagttagaaaacgagccagtaatcttaccatgtcctcaaataaatacgctatcatccggatataatatattagatattttatgggaaaaacgaggagcggataatgatagaattataccgatagataatggtagcaatatgctaattctgaacccgacacaatcagactctggtatttatatatgcattaccacgaacgaaacctactgtgacatgatgtcgttaaatttgacaatcgtgtctgtctcagaatcaaatatagatcttatctcgtatccacaaatagtaaatgagagatctactggcgaaatggtatgtcccaatattaatgcatttattgctagtaacgtaaacgcagatattatatggagcggacatcgacgccttagaaataagagacttaaacaacggacacctggaattattaccatagaagatgttagaaaaaatgatgctggttattatacatgtgttttagaatatatatacggtggcaaaacatataacgtaaccagaattgtaaaattagaggtacgggatagaataataccttctactatgcaattaccagatggcattgtaacttcaataggtagtaatttgactattgcatgcagagtatcgttgagacctcccacaacggacaccgacgtcttttggataagtaatggtatgtattacgaagaagatgatggggacggaaacggtagaataagtgtagcaaataaaatctatatgaccgataagagacgtgttattacatcccggttaaacattaatcctgtcaaggaagaagatgctacaacgtttacgtgtatggcgtttactattcctagcatcagcaaaacagttactgttagtataacgtgaatgtatgttgttacatttccatgtcaattgagtttataagaatttttatacattatcttccaacaaacaattgacgaacgtattgctatgattaactcccacgatactatgcatattattaatcattaacttgcagactatacctagtgctattttgacatactcgtgttcttgtgtaattgcggtatctatattattaaagtacgtaaatctagctatagttttattatttaattttagataatataccgtctccttatttttaaaaattgccacatcctttattaaatcatgaatgggaatttctatgtcatcgttagtatattgtgaacaacaagagcagatatctataggaaagggtggaatgcgatacattgatctatgtagttttaaaacacacgcgaactttgaagaatttatataaatcattccatcgatacatccttctatgttgacatgtatatatccaggaattcttttattaatgtcaggaaatgtataaactaaaacattgcccgaaagcggtgcctctatctgcgttatatccgttcttaacttacaaaatgtaaccaatacctttgcatgacttgttttgttcggcaacgttagtttaaacttgacgaatggattaattacaatagcatgatccgcgcatctattaagtttttttactttaacgcccttgtatgtttttacagagactttatctaaatttctagtgcttgtatgtgttataaatataacgggatatagaaccgaatcacctaccttagatacccaattacattttatcagatccagataataaacaaattttgtcgccctaactaattctatattgttatatattttacaattggttatgatatcatgtaataacttggagtctaacgcgcatcgtcgtacgtttatacaattgtgatttagtgtagtatatctacacatgtatttttccgcactatagtattctggactagtgataaaactatcgttatatctgtcttcaatgaactcatcgagatattgctctctgtcatattcatacacctgcataaactttctagacatcttacaatccgtgttattttaggatcatatttacatatttacgggtatatcaaagatgttagattagttaatgggaatcgtctataataatgaatattaaacaattatatgaggacttttaccacaaagcatcataaaaatgagtcgtcgtctgatttatgttttaaatatcaaccgcaaatcaactcataaaatacaagagaatgaaatatatacatattttagtcattgcaatatagaccatacttctacagaacttgattttgtagttaaaaactatgatctaaacagacgacaacctgtaactgggtatactgcactacactgctatttgtataataattactttacaaacgatgtactgaagatattattaaatcatgacgtaaatgtaacgatgaaaaccagtagcggacgtatgcctgtttatatattgcttactagatgttgtaatatttcacatgatgtagtgatagatatgatagacaaagataaaaaccacttattacatagagactattccaacctattactagagtatataaaatctcgttacatgttattgaaggaagaggatatcgatgagaacatagtatccactttattagataagggaatcgatcctaactttaaacaagacggatatacagcgttacattattattatttgtgtctcgcacacgtttataaactaggtgagtgtagaaaaccgataacgataaaaaaggccaagcgaattatttctttgtttatacaacatggagctaatctaaacgcgttagataattgtggtaatacaccattccatttgtatcttagtattgaaatgtgtaataatattcatatgactaaaatgctgttgacttttaatccgaatttcaaaatatgtaataatcatggattaacgcctatactatgttatataacttccgactacatacaacacgatattcttgttatgttaatacatcactatgaaacaaatgttggagaaatgccgatagatgagcgtcgtatgatcgtattcgagtttatcaaaacatattctacacgtccggcagattcgataacttatttgatgaataggtttaaaaatataaatatttatacccgctatgaaggaaagacattattacacgtagcatgtgaatataataatacacaagtaatagattatcttatacgtatcaacggagatataaatgcgttaaccgacaataacaaacacgctacacaactcattatagataacaaagaaaattccccatataccattaattgtttactgtatatacttagatatattgtagataagaatgtgataagatcgttggtggatcaacttccatctctacctatcttcgatataaaatcatttgagaaattcatatcctactgtatacttttagatgacacattttacgataggcacgttaagaatcgcgattctaaaacgtatcgatacgcattttcaaaatacatgtcgtttgataaatacgatggtataataactaaatgtcacgacgaaacaatgttactcaaactgtccactgttctagacactacactatatgcagttttaagatgtcataattcgagaaagttaagaagatacctcaacgagttaaaaaaatataataacgataagtcctttaaaatatattctaatattatgaatgagagataccttaatgtatattataaagatatgtacgtgtcaaaggtatatgataaactatttcctgttttcacagataaaaattgtctactaacattactaccttcagaaattatatacgaaatattatacatgctgacaattaacgatctttataatatatcgtatccacctaccaaagtatagttgtatttttctcatgcgatgtgtgtaaaaaaactgatattatataaatattttagtgccgtataataaagatgacgatgaaaatgatggtacatatatatttcgtatcattattgttattgctattccacagttacgccatagacatcgaaaatgaaatcacagaattcttcaataaaatgagagatactctaccagctaaagactctaaatggttgaatccagcatgtatgttcggaggcacaatgaatgatatagccgctctaggagagccattcagcgcaaagtgtcctcctattgaagacagtcttttatcgcacagatataaagactatgtggttaaatgggagaggctagaaaagaatagacggcgacaggtttctaataaacgtgttaaacatggtgatttatggatagccaactatacatctaaattcagtaaccgtaggtatttgtgcaccgtaactacaaagaatggtgactgtgttcagggtatagttagatctcatattaaaaaacctccttcatgcattccaaaaacatatgaactaggtactcatgataagtatggcatagacttatactgtggaattctttacgcaaaacattataataatataacttggtataaagataataaggaaattaatatcgacgacattaagtattcacaaacgggaaaggaattaattattcataatccagagttagaagatagcggaagatacgactgttacgttcattacgacgacgttagaatcaagaatgatatcgtagtatcaagatgtaaaatacttacggttataccgtcacaagaccacaggtttaaactaatactagatccgaaaatcaacgtaacgataggagaacctgccaatataacatgcactgctgtgtcaacgtcattattgatcgacgatgtactgattgaatgggaaaatccatccggatggcttataggattcgattttgatgtatactctgttttaactagtagaggcggtatcaccgaggcgaccttgtactttgaaaatgttactgaagaatatataggtaatacatataaatgtcgtggacacaactattattttgaaaaaacccttacaactacagtagtattggagtaaatatacaatgcatttttatatacattactgaattattattactgaattattattactgaattattattaattatatcgtatttgtgctatagaatggatgaagatacgcgactatctaggtatttgtatctcaccgatagagaacatataaatgtagactctattaaacagttgtgtaaaatatcagatcctaatgcatgttatagatgtggatgtacggctttacatgagtacttttataattatagatcagtcaacggaaaatacaagtatagatacaacggttactatcaatattattcatctagcgattatgaaaattataatgaatattattatgatagaactggtatgaacagtgagagtgataatatatcaatcaaaacagaatatgaattctatgatgaaacacaagatcaaagtacacaactagtaggttacgacattaaactcaaaaccaatgaggatgattttatggctatgatagatcagtgggtgtccatgattatatagatgaatcaattaataaagtagtatatggaagagagtctcacgtaagatggcgggatatatggcaagaacataatgatggcgtatacagtataggaaaggagtgcatagataatatatacgaagacaaccataccgtagacgaattctacaagatagacagcgtatcagatgtagatgacgcggaacacatatctccgataactaaaaaaccatagaatcagttgatgataatacctacatttctaatcttccgtataccatcaaatacaaaatattcgagcaacaataagtattttttatacctttaaaactgataaataaattttttctagtgatattttggcaagatgagaatcctatttctcatcgctttcatgtatgggtgtgttcactcatatgttaacgcggttgaaaccaaatgtccaaatctagacattgtaacatcttctggagaatttcattgttcaggatgtgtggaacatatgcctgagtttagctatatgtattggttggcaaaggatatgaaatcggacgaggataccaagtttatagaacatctgggtgatggcatcaaagaagatgaaaccgttcgtaccacagatagtggaatcgtcactctacgtaaagtccttcatgtgactgatactaataaatttgataattataggttcacttgtgtcctcgctacgctagatggcatttataaaaagaatgtttgctgaagtagttgtgtgctactatttttatttatgatataatctaatggaattaatttgaattgatatttatccaatactaaagattatattagaatcaaattaatcttttatacgagaaaaaataacgacatacgtcgtcaacaaattaaactttttatttattagttaactagcttatagaacttgctcattgttatgtttctaaaacgggtacggcatataggacaattatccgacgcaccggtttctcttcgtgttctatgccatatattgatgcatgttatgcaaaatatatgagtacacgaatccaataaaccaaagtatctatcgttttgagtaaacaacttcatagcaaattccacattctttttctttacttactctatacacgtcctcgtatttatttagtattttgatgatatccaactcagaaatggttgttgtattattgggtgtatttggagtataggtattattagctatgtaccaatttaccaaccctcttaatattgattgataatcacatcggttatccaattaataactaaattgtagtgtatatatagaccatatatgtttctatttttttgacagttacgtatagtttcagtaagttttgattgttgtattcctgtatctctagataagttagtcatatagtcccttccggcgatacgttttttccaagcccgaaattgattagccaaatgtgtatttatttttgtgatattgatataatatttcggataatgcatactgttagtcttatatcatttggttcatctatgtattgtaatattgttacatgatctatagatgatgtattgattttggcaggatcgaattccatatccgcgactaaacagtgaaaaaaatgtaaatactttttaaattttaaattagtaaaacttttttttattttttatgattccaaaaatactgaatacaaagtcctaaattataaatatggagatcatactaccacaacttattattatgtatacaaggccggtgtaatagatagatatatataattctattacaccggcagacaattaccgaccggtatttgtcgttaccaacataccgtataatatgtaatatacaattccataacccattgacagttgttatacatcaaaattgcaattcttttgattacgatgttataagaatgtagttaattgatgtatgatgttaatgtgtcctctttcctcttataacatcgtaatcaaaaacttttttataatatatacctaataatgtgtcttaatagttctcgtgattcgtcaaacaatcattcttataaaatataataaagcaacgtaaaaacacataaaaataagcgtaactaataagacaatggatatttacgacgataaaggtctacagactattaaactgtttaataatgaatttgattgtataaggaatgacatcagagaattatttaaacatgtaactgattccgatagtatacaacttccgatggaagacaattctgatattatagaaaatatcagaaaaatactatatagacgattaaaaaatgtagaatgtgttgacatcgataacacaataacttttatgaaatacgatccaaatgatgataataagcgtacgtgttctaattgggtacccttaactaataactatatggaatattgtctagtaatatatttggaaacaccgatatgtggaggcaaaataaaattataccaccctacaggaaatataaagtcggataaggatattatgtttgcaaagactctagactttaaatcaacgaaagtgttaactggacgtaaaacaattgccgttctagacatatccgtttcatataatagatcaatgactactattcactacaacgacgacgttgatatagatatacatactgataaaaatggaaaagagttatgttattgttatataacaatagatgatcattacttggttgatgtggaaactataggagttatagtcaatagatctggaaaatgtctgttagtaaataaccatctaggtataggtatcgttaaagataaacgtataagcgatagttttggagatgtatgtatggatacaatatttgacttttctgaagcacgagagttattttcattaactaatgatgataacaggaatatagcatgggacactgataaactagacgatgatacagatatatggactcccgtcacagaagatgattacaaatttctttctagactagtattgtatgcaaaatctcaatcggatactgtatttgactattatgttcttactggtgatacggaaccacccactgtattcattttcaaggtaactagattttactttaatatgccgaaataaaaaatttttgtataatatctagaggtagaggtattgtttagataaatacaaataacatagatacatcgcatacttagcatttttataaatatacataagacatacactttatacatttttgtaaaaatactcataaaaaaatttataaaaattatggcacaaccatatcttgtataggtagtttagttcgtcgagtgaacctataaacagataatagacaacacataataatgcctactaatacaagcataataccgggagatgggatatatgacgttgtagtgtttgggttttctgaacgttgatagtctactaatactacatgctgacatctaatgcctgtataaccatgagagcatctacaatacataccgtcaatatctctagcgtggatacagtcaccgtgtaaacaatatccatctccctctggaccgcataatctgatagctggaatatctgttgtagcgtttgtaatttctggcaatgtcgtttcgatagcgttaccactatcggcgaatgatctgattatcatagcagcgaacaacaacatcagataatttatcaacatttttgatggattctgtgtttatgctgtttctcagtgtgtgtttatgacaagattgggaattttatattattaattcagtaatataaactaataatatattgttaattgtgtaaataatataaaaataacaatacaatattgaatgtgttgctgttaaaaatgtatgtgttaatataatagaataaaataaatgagtatgatcattttagataacgattgattttatcattaccgcttcattcttatattctttgcttacggaacctatatttagaaacatctactaacaattttttatgcttgcattattaatggtatgtaatatgattgattgtgtacgcaataccaatttgttaagtatgaatacggggtacaaacataaattgaaatttaacattatttatttatgatatatatcgttatcgttaggtctataccatggatatctttaaagaactaatcttaaaacaccctgatgaaaatgttttgatttctccagtttccattttatctactttatctattctaaatcatggagcagctggttctacagctgaacaactatcaaaatatatagagaatatgaatgagaatacacccgatgacaataatgatgacatggaggtagatattccgtattgtgcgacactagctaccgcaaataaaatatacggtagcgatagtatcgagttccacgcctccttcctacaaaaaataaaagacgattttcaaactgtaaactttaataatgctaaccaaacaaaggaactaatcaacgaatgggttaagacaatgacaaatggtaaaattaattccttattgactagtccgctatccattaatactcgtatgacagttgttagcgccgtccattttaaagcaatgtggaaatatccattttctaaacatcttacatatacagacaagttttatatttctaagaatatagttaccagcgttgatatgatggtgggtaccgagaataacttgcaatatgtacatattaatgaattattcggaggattctctattatcgatattccatacgagggaaactctagtatggtaattatactaccggacgacatagaaggtatatataacatagaaaaaaatataacagatgaaaaatttaaaaaatggtgtggtatgttatctactaaaagtatagacttgtatatgccaaagtttaaagtggaaatgacagaaccgtataatctggtaccgattttagaaaatttaggacttactaatatattcggatattatgcagattttagcaagatgtgtaatgaaactatcactgtagaaaaatttctacatacgacgtttatagatgttaatgaggagtatacagaagcatcggccgttacaggagtatttacgattaacttttcgatggtatatcgtacgaaggtctacataaaccatccattcatgtacatgattaaagacaccacaggacgtatactttttatagggaaatactgctatccgcaataaatataaacaaatagacttttataaagagtcttcaacgataagtatatcgacatactacttatgctgcgaaagattctgaacgagaacgactatctcaccctcttggatcatatccgcactgctaaatactaaatctccactacactttttatcatcttatgaggaatgattgccttcgtgaaataggaataattagcaccagaatagctatggattattgtggtagagagtgcactattctatgtcgtctactggatgaagatgtgacgtacaaaaaaataaaactagaaattgaaacgtgtcacaacttatcaaaacatatagatagacgaggaaacaatgcgctacattgttacgtctccaataaatgcgatacagacattaagattgttctctcgcggagtcgagagactttgtagaaacaacgaaggattaactccgctaggagtatacagtaagcatagatacgtaaaatctcagattgtgcatctactgatatccagctattcaaattcctctaacgaactcaagtcgaatataaatgatttcgatctgtattcggataatatcgacttacgtctgctaaaatacctaattgtggataaacggatacgtccgtccaagaatacgaattatgcaatcaatggtctcggattggtggatatatacgtaacgacgcctaatccgagaccagaagtattgctatggcttcttaaatcagaatgttacagcaccggttacgtatttcgtacctgtatgtacgacagtgatatgtgtaagaactctcttcattactatatatcgtctcatagagaatctcaatctctatccaaggatgtaattaaatgtttgatcgataacaatgtttccatccatggcagagacgaaggaggatctttacccatccaatactactggtctttctcaaccatagatatagagattgttaaattattattaataaaggatgtggacacgtgtagagtatacgacgtcagccctatattagaggcgtattatctaaacaagcgatttagagtaaccccatataatgtagacatggaaatcgttaatcttcttattgagagacgtcatactcttgtcgacgtaatgcgtagtattacttcgtacgattccagagaatataaccactacatcatcgataacattctaaagagatttagacaacaggatgaatccatcgtacaagccatactgataaactacttacattacggcgatatggtcgttcgatgcatgttagataacggacaacaactatcctctacacgactactttgttaataataatctcgtcgatgtaaacgtcgtaaggtttatcgtggaaaatatggacacgcggctgtaaatcacgtatcgaacaatggccgtctatgtatgtacggtctgatattatcgagatttaataattgcgggtatcactgttatgaaaccatactgatagatgtatttgatatactaagcaagtacatggatgatatagatatgatcgataactctactatattacgcggtcgatgtcaataatatacaatttgcaaagcggttattggaatatggagcgagtatcacgctcgataatcaatacggccatccagaaaagcagttacagaagagaaaacaaaacgaaatcgttgttctacaagatgtctctccctacgacgattactacgtaaaaaagatactagcctactgcctattaagggacgagtcattcgcggaactacatagtaaattctgtttaaacgaggactataaaagtgtatttatgaaaaatatatcattcgataagatagattccatcatcgtgacataagtcgcctcaaagagattcgaatctccgacaccgacctgtatacggtatcacagctatcttaaagccatacattcagacagtcacatttcatttcccatgtacgacgatctcatagaacagtgccatctatcgatggagcgtaaaagtaaactcgtcgacaaagcactcaataaattagagtctaccatcggtcaatctagactatcgtatttgcctccggaaattatgcgcaatatcatctaaacagtatgttgtacggaaagaaccattacaaatattatccatgatagaaagaaaatatctatatgattggagaagtaggaaacaggaacaagacaacgattactacattattaaatcatgaagtccgtattatactcgtatatattgtttctctcatgtataataataaacggaagagatatagcaccgcatgcaccatccgatggaaagtgtaaagacaacgaatacaaacgccataatttgtgtccgggaacatacgcttccagattatgcgatagcaagactaacacacgatgtacgccgtgtggttcgggtaccttcacatctcgcaataatcatttacccgcttgtctaagttgtaacggaagacgcgatcgtgtaacacgactcacaatagaatctgtgaatgctctcccggatattattgtcttctcaaaggatcatccggatgcaaggcatgtgtttcccaaacaaaatgtggaataggatacggagtatccggagacgtcatctgttctccgtgtggtctcggaacatattctcacaccgtctcttccgcagataaatgcgaacccgtacccagaaatacgtttaactatatcgatgtggaaattaacctgtatccagttaacgacacgtcgtgtactcggacgaccactaccggtctcagcgaatccatctcaacgtcggaactaactattactatgaatcataaagactgtaatcccgtatttcgtgatggatacttctccgttcttaataaggtagcgacttcaggtttctttacaggagaaaggtgtgcactctgaatttcgagattaaatgcaataacaaagattcttcctccaaacagttaacgaaagcaaagaatgatactatcatgccgcattcggagacagtaactctagtgggcgacatctatatactatatagtaataccaatactcaagactacgaaactgatacaatctcttatcatgtgggtaatgttctcgatgtcgatagccatatgcccggtagttgcgatatacataaactgatcactaattccaaacccacccactttttatagtaagtttttcacccataaataataaatacaataattaatttctcgtaaaagtagaaaatatattctaatttattgcacggtaaggaagtagaatcataaagaacagtactcaatcaatagcaattatgaaacaatatatcgtcctggcatgcatgtgcctggcggcagctgctatgcctgccagtcttcagcaatcatcctcatcctcctcctcgtgtacggaagaagaaaacaaacatcatatgggaatcgatgttattatcaaagtcacaaagcaagaccaaacaccgaccaatgataagatttgccaatccgtaacggaaattacagagtccgagtcagatccagatcccgaggtggaatcagaagatgattccacatcagtcgaggatgtagatcctcctaccacttattactccatcatcggtggaggtctgagaatgaactttggattcaccaaatgtcctcagattaaatccatctcagaatccgctgatggaaacacagtgaatgctagattgtccagcgtgtccccaggacaaggtaaggactctcccgcgatcactcatgaagaagctcttgctatgatcaaagactgtgaagtgtctatcgacatcagatgtagcgaagaagagaaagacagcgacatcaagacccatccagtactcgggtctaacatctctcataagaaagtgagttacgaagatatcatcggttcaacgatcgtcgatacaaaatgcgtcaagaatctagagtttagcgttcgtatcggagacatgtgcaaggaatcatctgaacttgaggtcaaggatggattcaagtatgtcgacggatcggcatctgaaggtgcaaccgatgatacttcactcatcgattcaacaaaactcaaagcgtgtgtctgaatcgataactctattcatctgaaattggatgagtagggttaatcgaacgattcaggcacaccacgaattaaaaaagtgtaccggacactatattccggtttgcaaaacaaaaatgttcttaactacattcacaaaaagttacctctcgcgacttcttctttttctgtctcaatagtgtgatacgattatgacactattcctattcctattcctatttcctttcagagtatcacaaaaatattaaacctctttctgatggtctcataaaaaaagttttacaaaaatatttttattctctttctctctttgatggtctcataaaaaaagttttacaaaaatatttttattctctttctctctttgatggtctcataaaaaaagttttacaaaaatatttttattctctttctctctttgatggtctcataaaaaaagttttacaaaaatatttttattctctttctctctttgatggtctcataaaaaaagttttacaaaaatatttttattctctttctctctttgatggtctcataaaaaaagttttacaaaaatatttttattctctttctctctttgatggtctcataaaaaaagttttacaaaaatatttttattctctttctctctttgatggtctcataaaaaaagttttacaaaaatatttttattctctttctctctttgatggtctcataaaaaaagttttacaaaaatatttttattctctttctctctttgatggtctcataaaaaaagttttacaaaaatatttttattctctttctctctttgatggtctcataaaaaaagttttacaaaaatatttttattctctttctctctttgatggtctcataaaaaaagttttacaaaaatatttttattctctttctctctttgatggtctcataaaaaagttttacaaaaatatttttattctctttctctctttgatggtctcataaaaaagttttacaaaaatatttttattctctttctctctttgatggtctcataaaaaaagttttacaaaaatatttttattctctttctctctttgatggtctcataa

SEQ ID NO: 6 - DNA, 199504 bp, Artificial Sequence
  GLV-1h253 genome
ttatgagaccatcaaagagagaaagagaataaaaatatttttgtaaaactttttttatgagaccatcaaagagagaaagagaataaaaatatttttgtaaaacttttttatgagaccatcaaagagagaaagagaataaaaatatttttgtaaaacttttttatgagaccatcaaagagagaaagagaataaaaatatttttgtaaaactttttttatgagaccatcaaagagagaaagagaataaaaatatttttgtaaaactttttttatgagaccatcaaagagagaaagagaataaaaatatttttgtaaaactttttttatgagaccatcaaagagagaaagagaataaaaatatttttgtaaaactttttttatgagaccatcaaagagagaaagagaataaaaatatttttgtaaaactttttttatgagaccatcaaagagagaaagagaataaaaatatttttgtaaaactttttttatgagaccatcaaagagagaaagagaataaaaatatttttgtaaaactttttttatgagaccatcaaagagagaaagagaataaaaatatttttgtaaaactttttttatgagaccatcaaagagagaaagagaataaaaatatttttgtaaaactttttttatgagaccatcaaagagagaaagagaataaaaatatttttgtaaaactttttttatgagaccatcaaagagagaaagagaataaaaatatttttgtaaaactttttttatgagaccatcaaagagagaaagagaataaaaatatttttgtaaaactttttttatgagaccatcagaaagaggtttaatatttttgtgatactctgaaaggaaataggaataggaataggaatagtgtcataatcgtatcacactattgagacagaaaaagaagaagtcgcgagaggtaactttttgtgaatgtagttaagaacatttttgttttgcaaaccggaatatagtgtccggtacacttttttaattcgtggtgtgcctgaatcgttcgattaaccctactcatccaatttcagatgaatagagttatcgattcagacacacgctttgagttttgttgaatcgatgagtgaagtatcatcggttgcaccttcagatgccgatccgtcgacatacttgaatccatccttgacctcaagttcagatgattccttgcacatgtctccgatacgaacgctaaactctagattcttgacgcattttgtatcgacgatcgttgaaccgatgatatcttcgtaactcactttcttatgagagatgttagacccgagtactggatgggtcttgatgtcgctgtctttctcttcttcgctacatctgatgtcgatagacacttcacagtctttgatcatagcaagagcttcttcatgagtgatcgcgggagagtccttaccttgtcctggggacacgctggacaatctagcattcactgtgtttccatcagcggattctgagatggatttaatctgaggacatttggtgaatccaaagttcattctcagacctccaccgatgatggagtaataagtggtaggaggatctacatcctcgactgatgtggaatcatcttctgattccacctcgggatctggatctgactcggactctgtaatttccgttacggattggcaaatcttatcattggtcggtgtttggtcttgctttgtgactttgataataacatcgattcccatatgatgtttgttttcttcttccgtacacgaggaggaggatgaggatgattgctgaagactggcaggcatagcagctgccgccaggcacatgcatgccaggacgatatattgtttcataattgctattgattgagtactgttctttatgattctacttccttaccgtgcaataaattagaatatattttctacttttacgagaaattaattattgtatttattatttatgggtgaaaaacttactataaaaagtgggtgggtttggaattagtgatcagtttatgtatatcgcaactaccgggcatatggctatcgacatcgagaacattacccacatgataagagattgtatcagtttcgtagtcttgagtattggtattactatatagtatatagatgtcgcccactagagttactgtctccgaatgcggcatgatagtatcattctttgctttcgttaactgtttggaggaagaatctttgttattgcatttaatctcgaaattcagagtgcacacctttctcctgtaaagaaacctgaagtcgctaccttattaagaacggagaagtatccatcacgaaatacgggattacagtctttatgattcatagtaatagttagttccgacgttgagatggattcgctgagaccggtagtggtcgtccgagtacacgacgtgtcgttaactggatacaggttaatttccacatcgatatagttaaacgtatttctgggtacgggttcgcatttatctgcggaagagacggtgtgagaatatgttccgagaccacacggagaacagatgacgtctccggatactccgtatcctattccacattttgtttgggaaacacatgccttgcatccggatgatcctttgagaagacaataatatccgggagagcattcacagattctattgtgagtcgtgttacacgatcgcgtcttccgttacaacttagacaagcgggtaaatgattattgcgagatgtgaaggtacccgaaccacacggcgtacatcgtgtgttagtcttgctatcgcataatctggaagcgtatgttcccggacacaaattatggcgtttgtattcgttgtctttacactttccatcggatggtgcatgcggtgctatatctcttccgtttattattatacatgagagaaacaatatatacgagtataatacggacttcatgatttaataatgtagtaatcgttgtcttgttcctgtttcctacttctccaatcatatagatattttctttctatcatggataatatttgtaatggttctttccgtacaacatactgtttagatgatattgcgcataatttccggaggcaaatacgatagtctagattgaccgatggtagactctaatttattgagtgctttgtcgacgagtttacttttacgctccatcgatagatggcactgttctatgagatcgtcgtacatgggaaatgaaatgtgactgtctgaatgtatggctttaagatagctgtgataccgtatacaggtcggtgtcggagattcgaatctctttgaggcgacttatgtcacgatgatggaatctatcttatcgaatgatatatttttcataaatacacttttatagtcctcgtttaaacagaatttactatgtagttccgcgaatgactcgtcccttaataggcagtaggctagtatcttttttacgtagtaatcgtcgtagggagagacatcttgtagaacaacgatttcgttttgttttctcttctgtaactgcttttctggatggccgtattgattatcgagcgtgatactcgctccatattccaataaccgctttgcaaattgtatattattgacatcgaccgcgtaatatagtagagttatcgatcatatctatatcatccatgtacttgcttagtatatcaaatacatctatcagtatggtttcataacagtgatacccgcaattattaaatctcgataatatcagaccgtacatacatagacggccattgttcgatacgtgatttacagccgcgtgtccatattttccacgataaaccttacgacgtttacatcgacgagattattattaacaaagtagtcgtgtagaggatagttgttgtccgttatctaacatgcatcgaacgaccatatcgccgtaatgtaagtagtttatcagtatggcttgtacgatggattcatcctgttgtctaaatctctttagaatgttatcgatgatgtagtggttatattctctggaatcgtacgaagtaatactacgcattacgtcgacaagagtatgacgtctctcaataagaagattaacgatttccatgtctacattatatggggttactctaaatcgcttgtttagataatacgcctctaatatagggctgacgtcgtatactctacacgtgtccacatcctttattaataataatttaacaatctctatatctatggttgagaaagaccagtagtattggatgggtaaagatcctccttcgtctctgccatggatggaaacattgttatcgatcaaacatttaattacatccttggatagagattgagattctctatgagacgatatatagtaatgaagagagttcttacacatatcactgtcgtacatacaggtacgaaatacgtaaccggtgctgtaacattctgatttaagaagccatagcaatacttctggtctcggattaggcgtcgttacgtatatatccaccaatccgagaccattgattgcataattcgtattcttggacggacgtatccgtttatccacaattaggtattttagcagacgtaagtcgatattatccgaatacagatcgaaatcatttatattcgacttgagttcgttagaggaatttgaatagctggatatcagtagatgcacaatctgagattttacgtatctatgcttactgtatactcctagcggagttaatccttcgttgtttctacaaagtctctcgactccgcgagagaacaatcttaatgtctgtatcgcatttattggagacgtaacaatgtagcgcattgtttcctcgtctatctatatgttttgataagttgtgacacgtttcaatttctagttttatttttttgtacgtcacatcttcatccagtagacgacatagaatagtgcactctctaccacaataatccatagctattctggtgctaattattcctatttcacgaaggcaatcattcctcataagatgataaaaagtgtagtggagatttagtatttagcagtgcggatatgatccaagagggtgagatagtcgttctcgttcagaatctttcgcagcataagtagtatgtcgatatacttatcgttgaagactctttataaaagtctatttgtttatatttattgcggatagcagtatttccctataaaaagtatacgtcctgtggtgtctttaatcatgtacatgaatggatggtttatgtagaccttcgtacgatataccatcgaaaagttaatcgtaaatactcctgtaacggccgatgcttctgtatactcctcattaacatctataaacgtcgtatgtagaaatttttctacagtgatagtttcattacacatcttgctaaaatctgcataatatccgaatatattagtaagtcctaaattttctaaaatcggtaccagattatacggttctgtcatttccactttaaactttggcatatacaagtctatacttttagtagataacataccacaccattttttaaatttttcatctgttatatttttttctatgttatatataccttctatgtcgtccggtagtataattaccatactagagtttccctcgtatggaatatcgataatagagaatcctccgaataattcattaatatgtacatattgcaagttattctcggtacccaccatcatatcaacgctggtaactatattcttagaaatataaaacttgtctgtatatgtaagatgtttagaaaatggatatttccacattgctttaaaatggacggcgctaacaactgtcatacgagtattaatggatagcggactagtcaataaggaattaattttaccatttgtcattgtcttaacccattcgttgattagttcctttgtttggttagcattattaaagtttacagtttgaaaatcgtcttttattttttgtaggaaggaggcgtggaactcgatactatcgctaccgtatattttatttgcggtagctagtgtcgcacaatacggaatatctacctccatgtcatcattattgtcatcgggtgtattctcattcatattctctatatattttgatagttgttcagctgtagaaccagctgctccatgatttagaatagataaagtagataaaatggaaactggagaaatcaaaacattttcatcagggtgttttaagattagttctttaaagatatccatggtatagacctaacgataacgatatatatcataaataaataatgttaaatttcaatttatgtttgtaccccgtattcatacttaacaaattggtattgcgtacacaatcaatcatattacataccattaataatgcaagcataaaaaattgttagtagatgtttctaaatataggttccgtaagcaaagaatataagaatgaagcggtaatgataaaatcaatcgttatctaaaatgatcatactcatttattttattctattatattaacacatacatttttaacagcaacacattcaatattgtattgttatttttatattatttacacaattaacaatatattattagtttatattactgaattaataatataaaattcccaatcttgtcataaacacacactgagaaacagcataaacacagaatccatcaaaaatgttgataaattatctgatgttgttgttcgctgctatgataatcagatcattcgccgatagtggtaacgctatcgaaacgacattgccagaaattacaaacgctacaacagatattccagctatcagattatgcggtccagagggagatggatattgtttacacggtgactgtatccacgctagagatattgacggtatgtattgtagatgctctcatggttatacaggcattagatgtcagcatgtagtattagtagactatcaacgttcagaaaacccaaacactacaacgtcatatatcccatctcccggtattatgcttgtattagtaggcattattatgtgttgtctattatctgtttataggttcactcgacgaactaaactacctatacaagatatggttgtgccataatttttataaatttttttatgagtatttttacaaaaatgtataaagtgtatgtcttatgtatatttataaaaatgctaagtatgcgatgtatctatgttatttgtatttatctaaacaatacctctacctctagatattatacaaaaattttttatttcggcatattaaagtaaaatctagttaccttgaaaatgaatacagtgggtggttccgtatcaccagtaagaacataatagtcaaatacagtatccgattgagattttgcatacaatactagtctagaaagaaatttgtaatcatcttctgtgacgggagtccatatatctgtatcatcgtctagtttatcagtgtcccatgctatattcctgttatcatcattagttaatgaaaataactctcgtgcttcagaaaagtcaaatattgtatccatacatacatctccaaaactatcgcttatacgtttatctttaacgatacctatacctagatggttatttactaacagacattttccagatctattgactataactcctatagtttccacatcaaccaagtaatgatcatctattgttatataacaataacataactcttttccatttttatcagtatgtatatctatatcaacgtcgtcgttgtagtgaatagtagtcattgatctattatatgaaacggatatgtctagaacggcaattgttttacgtccagttaacactttcgttgatttaaagtctagagtctttgcaaacataatatccttatccgactttatatttcctgtagggtggtataattttattttgcctccacatatcggtgtttccaaatatattactagacaatattccatatagttattagttaagggtacccaattagaacacgtacgcttattatcatcatttggatcgtatttcataaaagttattgtgttatcgatgtcaacacattctacattttttaatcgtctatatagtatttttctgatattttctataatatcagaattgtcttccatcggaagttgtatactatcggaatcagttacatgtttaaataattctctgatgtcattccttatacaatcaaattcattattaaacagtttaatagtctgtagacctttatcgtcgtaaatatccattgtcttattagttacgcttatttttatgtgtttttacgttgctttattatattttataagaatgattgtttgacgaatcacgagaactattaagacacattattaggtatatattataaaaaagtttttgattacgatgttataagaggaaagaggacacattaacatcatacatcaattaactacattcttataacatcgtaatcaaaagaattgcaattttgatgtataacaactgtcaatgggttatggaattgtatattacatattatacggtatgttggtaacgacaaataccggtcggtaattgtctgccggtgtaatagaattatatatatctatctattacaccggccttgtatacataataataagttgtggtagtatgatctccatatttataatttaggactttgtattcagtatttttggaatcataaaaaataaaaaaaagttttactaatttaaaatttaaaaagtatttacatttttttcactgtttagtcgcggatatggaattcgatcctgccaaaatcaatacatcatctatagatcatgtaacaatattacaatacatagatgaaccaaatgatataagactaacagtatgcattatccgaaatattatatcaatatcacaaaaataaatacacatttggctaatcaatttcgggcttggaaaaaacgtatcgccggaagggactatatgactaacttatctagagatacaggaatacaacaatcaaaacttactgaaactatacgtaactgtcaaaaaaatagaaacatatatggtctatatatacactacaatttagttattaattggataaccgatgtgattatcaatcaatattaagagggttggtaaattggtacatagctaataatacctatactccaaatacacccaataatacaacaaccatttctgagttggatatcatcaaaatactaaataaatacgaggacgtgtatagagtaagtaaagaaaaagaatgtggaatttgctatgaagttgtttactcaaaacgatagatactttggtttattggattcgtgtactcatatattttgcataacatgcatcaatatatggcatagaacacgaagagaaaccggtgcgtcggataattgtcctatatgccgtacccgttttagaaacataacaatgagcaagttctataagctagttaactaataaataaaaagtttaatttgttgacgacgtatgtcgttattttttctcgtataaaagattaatttgattctaatataatctttagtattggataaatatcaattcaaattaattccattagattatatcataaataaaaatagtagcacacaactacttcagcaaacattctttttataaatgccatctagcgtagcgaggacacaagtgaacctataattatcaaatttattagtatcagtcacatgaaggactttacgtagagtgacgattccactatctgtggtacgaacggtttcatcttctttgatgccatcacccagatgttctataaacttggtatcctcgtccgatttcatatcctttgccaaccaatacatatagctaaactcaggcatatgttccacacatcctgaacaatgaaattctccagaagatgttacaatgtctagatttggacatttggtttcaaccgcgttaacatatgagtgaacacacccatacatgaaagcgatgagaaataggattctcatcttgccaaaatatcactagaaaaaatttatttatcagttttaaaggtataaaaaatacttattgttgctcgaatattttgtatttgatggtatacggaagattagaaatgtaggtattatcatcaactgattctatggttttatgtattctatcatgtttcactattgcgttggaaataatatcatatgcttccacatatattttattttgttttaactcataatactcacgtaattctggattattggcatatctatgaataattttagctccatgatcagtaaatattaatgagaacatagtattaccacctaccattatttttttcatctcattcaattcttaattgcaaagatctatataatcattatagcgttgacttatggactctggaatcttagacgatgtacagtcatctataatcatggcatatttaatacattgttttatagcatagtcgttatctacgatgttagatatttctctcaatgaatcaatcacacaatctaatgtaggtttatgacataatagcattttcagcagttcaatgtttttagattcgttgatggcaatggctatacatgtatatccgttatttgatctaatgttgacatctgaaccggattctagcagtaaagatactagagattgtttattatatctaacagccttgtgaagaagtgtttctcctcgtttgtcaatcatgttaatgtctttaagataaggtaggcaaatgtttatagtactaagaattgggcaagcataagacatgtcacaaagacccttttttgtatgtataagtgtaaaaattataacatccatagttggatttacataggtgtccaatcgggatctctccatcatcgagataattgatggcatctcccttccttttttagtagatatttcatcgtgtaagaatcaatattaatatttctaaagtatccgtgtatagcctctttatttaccacagctccatattccactagagggatatcgccgaatgtcatatactcaattagtatatgttggaggacatccgagttcattgttttcaatatcaaagagatggtttccttatcatttctccatagtggtacaatactacacattattccgtgcggctttccattttccaaaaacaatttgaccaaatctaaatctacatctttattgtatctataatcactatttagataatcagccataattcctcgagtgcaacatgttagatcgtctatatatgaataagcagtgttatctattcctttcattaacaatttaacgatgtctatatctatatgagatgacttaatataatattgaagagctgtacaatagtttttatctataaaagacggcttgattccgtgattaattagacatttaacaacttccggacgcacatatgctctcgtatccgactctgaatacagatgagagatgatatacagatgcaatacggtaccgcaatttcgtagttgataatcatcatacgcgtatcagtactcgtcctcataaagaacactgcagccattttctatgaacaaatcaataattttagaaacaggatcattgtcattacataattttctataactgaacgatggttttcacatttaacactcaagtcaaatccatgttctaccaacacctttatcaagtcaacgtctacatttttggatttcatatagctgaatatattaaagttatttatgttgctaaatccagtggcttctagtagagccatcgctatatccttattaactttaacatgtctactatttgtgtattcttctaatggggtaagctgtctccaatttttgcgtaatggattagtgccactgtctagtagtagtttgacgacctcgacattattacaatgctcattaaaaaggtatgcgtgtaaagcattattcttgaattggttcctggtatcattaggatctctgtctttcaacatctgtttaagttcatcaagagccacctcctcattttccaaatagtcaaacattttgactgaatgagctactgtgaactctatacacccacacaactaatgtcattaaatatcatgtcaaaaacttgtacaattattaataaaaataatttagtgtttaaattttaccagttccagattttacacctccgttaatacctccattaaccccactggacgatcctcctccccacattccaccgccaccagatgtataagttttagatcctttattactaccatcatgtccatggataaagacactccacatgccgccactaccccctttagaagacatattaataagacttaaggacaagtttaacaataaaattaatcacgagtaccctactaccaacctacactattatatgattatagtttctatttttacagtaccttgactaaagtttctagtcacaagagcaatactaccaacctacactattatatgattatagtttctatttttataggaacgcgtacgagaaaatcaaatgtctaatttctaacggtagtgttgataaacgattgttatccgcggatacctcctctatcatgtcgtctattttcttactttgttctattaacttattagcattatatattatttgattataaaacttatattgcttattagcccaatctgtaaatatcggattattaacatatcgtttctttgtaggtttatttaacatgtacatcactgtaagcatgtccttaccatttattttaatttgacgcatatccgcaatttctttttcgcagtcggttataaattctatatatgatggatacatgctacatgtgtacttataatcgactaatatgaagtacttgatacatattttcagtaacgatttattattaccacctatgaataagtacctgtgatcgtctaggtaatcaactgttttcttaatacattcgatggttggtaatttactcagaataatttccaatatcttaatatataattctgctatttctgggatatatttatctgccagtataacacaaatagtaatacatgtaaacccatattttgttattatattaatgtctgcgccattatctattaaccattctactaggctgacactatgcgactcaatacaatgataaagtatactacatccatgtttatctattttgtttatatcatcaatatacggcttacaaagttttagtatcgataacacatccaactcacgcatagagaaggtagggaataatggcataatatttattaggttatcatcattgtcattatctacaactaagtttccattttttaaaatatactcgacaactttaggatctctattgccaaatttttgaaaatatttatttatatgcttaaatctatataatgtagctccttcatcaatcatacatttaataacattgatgtatactgtatgataagatacatattctaacaatagatcttgtatagaatctgtatatcttttaagaattgtggatattaggatattattacataaactattacacaattctaaaatataaaacgtatcacggtcgaataatagttgatcaactatataattatcgattttgtgatttttcttcctaaactgtttacgtaaatagttagatagaatattcattagttcatgaccactatagttactatcgaataacgcgtcaaatatttcccgtttaatatcgcatttgtcaagataataatagagtgtggtatgttcacgataagtataataacgcatctctttttcgtgtgaaattaaatagtttattacgtccaaagatgtagcataaccatcttgtgacctagtaataatataataatagagaactgttttacccattctatcatcataatcagtggtgtagtcgtaatcgtaatcgtctaattcatcatcccaattataatattcaccagcacgtctaatctgttctattttgatcttgtatccatactgtatgttgctacatgtaggtattcctttatccaataatagtttaaacacatctacattgggatttgatgttgtagcgtatttttctacaatattaataccatttttgatactatttatttctatacctttcgaaattagtaatttcaataagtctatattgatgttatcagaacatagatattcgaatatatcaaaatcattgatatttttatagtcgactgacgacaataacaaaatcacaacatcgtttttgatattattatttttcttggtaacgtatgcctttaatggagtttcaccatcatactcatataatggatttgcaccactttctatcaatgattgtgcactgctggcatcgatgttaaatgttttacaactatcatagagtatcttatcgttaaccatgattggttgttgatgctatcgcattttttggtttctttcatttcagttatgtatggatttagcacgtttgggaagcatgagctcatatgatttcagtactgtagtgtcagtactattagtttcaataagatcaatctctagatctatagaatcaaaacacgataggtcagaagataatgaatatctgtaggcttcttgttgtactgtaacttctggttttgttagatggttgcatcgtgctttaacgtcaatggtacaaattttatcctcgctttgtgtatcatattcgtccctactataaaattgtatattcagattatcatgcgatgtgtatacgctaacggtatcaataaacggagcacaccatttagtcataaccgtaatccaaaaatttttaaagtatatcttaacgaaagaagttgtgtcattgtctacggtgtatggtactagatcctcataagtgtatatatctagagtaatgtttaatttattaaatggttgataatatggatcctcgtgacaatttccgaagatggaaataagacataaacacgcaataaatctaattgcggacatggttactccttaaaaaaatacgaataatcaccttggctatttagtaagtgtcatttaacactatactcatattaatccatggactcataatctctatacgggattaacggatgttctatatacggggatgagtagttctcttctttaactttatactttttactaatcatatttagactgatgtatgggtaatagtgtttgaagagctcgttctcatcatcagaataaatcaatatctctgtttttttgttatacagatgtattacagcctcatatattacgtaatagaacgtgtcatctaccttattaactttcaccgcatagttgtttgcaaatacggttaatcctttgacctcgtcgatttccgaccaatctgggcgtataatgaatctaaactttaattgcttgtaatcattcgaaataatttttagtttgcatccgtagttatcccctttatgtaactgtaaatttctcaacgcgatatctccattaataatgatgtcgaattcgtgctgtatacccatactgaatggatgaacgaataccgacggcgttaatagtaatttactttttcatctttacatattgggtactagttttactatcataagtttataaattccacaagctactatggaataagccaaccatcttagtataccacacatgtcttaaagtttattaattaattacatgttgttttatatatatcgctacgaatttaaagagaaattagtttaggaagaaaaattatctatctacatcatcacgtctctgtattctacgatagagtgctactttaagatgcgacagatccgtgtcatcaaatatatactccattaaaatgattattccggcagcgaacttgatattggatatatcacaacctttgttaatatctacgacaatagacagcagtcccatggttccataaacagtgagtttatctttctttgaagagatattttgtagagatcttataaaactgtcgaatgacatcgcatttatatctttagctaaatcgtatatgttaccatcgtaatatctaaccgcgtctatcttaaacgtttccatcgctttaaagacgtttccgatagatggtctcatttcatcagtcatactgagccaacaaatataatcgtgtataacatctttgatagaatcagactctaaagaaaacgaatcggctttattatacgcattcatgataaacttaatgaaaaatgtttttcgttgtttaagttggatgaatagtatgtcttaataattgttattatttcattaattaatatttagtaacgagtacactctataaaaacgagaatgacataactaatcataactagttatcaaagtgtctaggacgcgtaattttcatatggtatagatcctgtaagcattgtctgtattctggagctattttctctatcgcattagtgagttcagaatatgttataaatttaaatcgaataacgaacataactttagtaaagtcgtctatattaactcttttattttctagccatcgtaataccatgtttaagatagtatattctctagttactacgatctcatcgttgtctagaatatcacatactgaatctacatccaattttagaaattggtctgtgttacatatctcttctatattattgttgatgtattgtcgtagaaaactattacgtagaccattttctttataaaacgaatatatagtactccaattatctttaccgatatatttgcacacataatccattctctcaatcactacatctttaagattttcgttgttaagatatttggctaaactatataattctattagatcatcaacagaatcagtatatatttttctagatccaaagacgaactctttggcgtcctctataatattcccagaaaagatattttcgtgttttagtttatcgagatctgatctgttcatatacgccatgattgtacggtacgttatgataaccgcataaaataaaaatccattttcatttttaaccaatactattcataattgagattgatgtaatactttgttactttgaacgtaaagacagtacacggatccgtatctccaacaagcacgtagtaatcaaatttggtgttgttaaacttcgcaatattcatcaatttagatagaaacttatactcatcatctgttttaggaatccatgtattattaccactttccaacttatcattatcccaggctatgtttcgtccatcatcgttgcgcagagtgaataattcttttgtattcggtagttcaaatatatgatccatgcatagatcggcaaagctattgtagatgtgatttttcctaaatctaatataaaactcgtttactagcaaacactttcctgatttatcgaccaagacacatatggtttctaaatctatcaagtggtggggatccatagttatgacgcagtaacatatattattacattcttgactgtcgctaatatctaaatatttattgttatcgtattggattctgcatatagatggcttgtatgtcaaagatatagaacacataaccaatttatagtcgcgctttacattctcgaatctaaagttaagagatttagaaaacattatatcctcggatgatgttatcactgtttctggagtaggatatattaaagtctttacagatttcgtccgattcaaataaatcactaaataatatcccacattatcatctgttagagtagtatcattaaatctattatattttatgaaagatatatcactgctcacctctatatttcgtacatttttaaactgtttgtataatatctctctgatacaatcagatatatctattgtgtcggtagacgataccgttacatttgaattaatggtgttccattttacaacttttaacaagttgaccaattcatttctaatagtatcaaactctccatgattaaatattttaatagtatccattttatatcactacggacacaaagtagctgacataaaccattgtataatttttatgttttatgtttattagcgtacacattttggaagttccggcttccatgtatttcctggagagcaagtagatgatgaggaaccagatagtttatatccgtacttgcacttaaagtctacattgtcgttgtatgagtatgatcttttaaacccgctagacaagtatccgtttgatattgtaggatgtggacatttaacaatctgacacgtgggtggatcggaccattctcctcctgaacacaggacactagagttaccaatcaacgaatatccactattgcaactataagttacaacgctcccatcggtataaaaatcctcgtatccgttatgtcttccgttggatatagatggaggggattggcatttaacagattcacaaataggtgcctcgggattccataccatagatccagtagatcctaattcacaatacgatttagattcaccgatcaactgatatccgctattacaagagtacgttatactagagccaaagtctactccaccaatatcaagttggccattatcgatatctcgaggcgatgggcatctccgtttaatacattgattaaagagtgtccatccagtacctgtacatttagcatatataggtcccattttttgctttctgtatccaggtagacatagatattctatagtgtctcctatgttgtaattagcattagcatcagtctccacactattcttaaatttcatattaatgggtcgtgacggaatagtacagcatgatagaacgcatcctattcccaacaatgtcaggaacgtcacgctctccaccttcatatttatttatccgtaaaaatgttatcctggacatcgtacaaataataaaaagcccatatatgttcgctattgtagaaattgtttttcacagttgctcaaaaacgatggcagtgacttatgagttacgttacactttggagtctcatctttagtaaacatatcataatattcgatattacgagttgacatatcgaacaaattccaagtatttgattttggataatattcgtattttgcatctgctataattaagatataatcaccgcaagaacacacgaacatctttcctacatggttaaagtacatgtacaattctatccatttgtcttccttaactatatatttgtatagataattacgagtctcgtgagtaattccagtaattacatagatgtcgccgtcgtactctacagcataaactatactatgatgtctaggcatgggagacttttttatccaacgatttttagtgaaacattccacatcgtttaatactacatatttctcatacgtggtataaactccacccattacatatatatcatcgtttacgaataccgacgcgcctgaatatctaggagtaattaagtttggaagtcttatccatttcgaagtgccgtgtttcaaatattctgccacacccgttgaaatagaaaattctaatcctcctattacatataactttccatcgttaacacaagtactaacttctgattttaacgacgacatattagtaaccgttttccattttttcgttttaagatctacccgcgatacggaataaacatgtctattgttaatcatgccgccaataatgtatagacaattatgtaaaacatttgcattatagaattgtctatctgtattaccgactatcgtccaatattctgttctaggagagtaatgggttattgtggatatataatcagagtttttaatgactactatattatgttttataccatttcgtgtcactggctttgtagatttggatatagttaatcccaacaatgatatagcattgcgcatagtattagtcataaacttgggatgtaaaatgttgatgatatctacatcgtttggatttttatgtatccactttaataatatcatagctgtaacatcctcatgatttacgttaacgtcttcgtgggataagatagttgtcagttcatcctttgataattttccaaattctggatcggatgtcaccgcagtaatattgttgattatttctgacatcgacgcattatatagttttttaattccatatcttttagaaaagttaaacatccttatacaatttgtgaaattaatattatgaatcatagtttttacacatagatctactacaggcggaacatcaattattatggcagcaactagtatcatttctacattgtttatggtgatgtttatcttcttccagcgcatatagtctaatagcgattcaaacgcgtgatagtttataccattcaatataatcgcttcatcctttagatggtgatcctgaatgcgtttaaaaaaattatacggagacgccgtaataatttccttattcacttgtataatttccccattgatagaaaatattacgctttccattcttaaagtactataagtaattatagtataatgtaaacgtttatatattcaatatttttataaaaatcattttgacattaattcctttttaaatttccgtctatcatctatagaaacgtattctatgaatttataaaatgcttttacgtgtcctatcgtaggcgatagaaccgctaaaaagcctatcgaatttctacaaaagaatctgttatatggtatagggagagtataaaacattaaatgtccgtacttattaaagtattcagtagccaatcctaactctttcgaatacttattaatggctcttgttctgtacgaatctatttttttgaacaacggacctagtggtatatcttgttctatgtatctaaaataatgtctgactagatccgttagtttaatatccgcagtcatcttgtctagaatggcaaatctaactgcgggtttaggctttagtttagtttctatatctacatctatgtctttatctaacaccaaaaatataatagctaatattttattacaatcatccggatattcttctacgatctcactaactaatgtttctttggttatactagtatagtcactatcggacaaataaagaaaatcagatgatcgatgaataatacatttaaattcatcatctgtaagatttttgagatgtctcattagaatattattagggttagtactcattatcattcggcagctattacttattttattatttttcaccatatagatcaatcattagatcatcaaaatatgtttcaatcatcctaaagagtatggtgaatgactcttcccatctaatttctgaacgttcaccaatgtctctagccactttggcactaatagcgatcattcgcttagcgtcttctatattattaactggttgatttaatctatctagcaatggaccgtcggacagcgtcattctcatgttcttaatcaatgtacatacatcgccgtcatctaccaattcatccaacaacataagctttttaaaatcatcattataataggtttgatcgttgtcatttctccaaagaatatatctaataagtagagtcctcatgcttagttaacaactattttttatgttaaatcaattagtacaccgctatgtttaatacttattcatattttagtttttaggattgagaatcaatacaaaaattaatgcatcattaattttagaaatacttagtttccacgtagtcaatgaaacatttgaactcatcgtacaggacgttctcgtacaggacgtaactataaaccggtttatatttgttcaagatagatacaaatccgataactttttttacgaattctacgggatccactttaaaagtgtcataccgggttctttttatttttttaaacagatcaatggtgtgatgttgattaggtcttttacgaatttgatatagaatagcgtttacatattctccataatggtcaatcgccatttgttcgtatgtcataaattctttaattatatgacactgtgtattatttagttcatccttgttcattgttaggaatctatccaaaatggcaattatactagaactataggtgcgttgtatacacatattgatgtgtctgtttatacaatccatgatatttggatccatgctactaccttcgggtaaaattgtagcatcatataccatttctagtactttaggttcattattatccattgcagaggacgtcatgatcgaatcataaaaaaatatattatttttatgttattttgttaaaaataatcatcgaatacttcgtaagatactccttcatgaacataatcagttacaaaacgtttatatgaagtaaagtatctacgatttttacaaaagtccggatgcataagtacaaagtacgcgataaacggaataataatagatttatctagtctatctttttctatagctttcatagttagatacatggtctcagaagtaggattatgtaacatcagcttcgataaaatgactgggttatttagtcttacacattcgctcatacatgtatgaccgttaactacagagtctacactaaaatgattgaacaatagatagtctaccattgtttcgtattcagatagtacagcgtagtacatggcatcttcacaaattatatcattgtctaatagatatttgacgcatcttatggatcccacttcaacagccatcttaaaatcatattgctttcctttatcattaataatttctagaacatcatctctatcataaaagatacaaatattaactgtttgatccgtaataacattgctagtcaatagcaatttgttaataagatgcgctgggctcaatgtcttaataagaagtgtaagaggactatctccgaatttgttttgtttattaacatccgttgatggaagtaaaagatctataatgtctacattcttgactgttttagagcatacaatatggagaggtgtatttccatcatgatctggttttgagggactaattcctagtttcatcatccatgagattgtagaagcttttggattgtctgacataagatgtctatgaatatgatttttgccaaatttatccactatcctggcttcgaatccgatggacattatttttttaaacactctttctgaaggatctgtacacgccaacaacggaccacatccttcttcatcaaccgagttgttaatcttggctccatactgtaccaataaatttattctctctatgacttcatcatctgttcccgagagataatatagaggtgttttatgctgtttatcacacgcgtttggatctgcgccgtgcgtcagcagcatcgcgactattctattattattaattttagaagctatatgcaatggataatttccatcatcatccgtctcatttggagagtatcctctatgaagaagttcttcgacaaatcgttcatctagtcctttaattccacaatacgcatgtagaatgtgataattatttccagaaggttcgatagcttgtagcatattcctaaatacatctaaatttttactattatatttggcataaagagatagataatactcggccgacataatgttgtccattgtagtataaaaattaatatttctatttctatttctgtatatttgcaacaatttactctctataacaaatatcataacttagtttttttatgtcaagaaggcactggtttagttcatctataaatgtcacgccataactaccacgcatgccatactcagaattatgataaagatatttatccttggggtgtaggtaatggggattaatctttgttggatcagtctctaagttaacacatgtcacacatgatccatttatagttatatcacacgatgatgatttatgaattgattccggaagatcgctatcgtattttgtggttccacaattcatttccatacatgttattgtcacactaatattatgatgaactttatctagccgctgagtggtaaacaacagaacagatagtttattatctttaccaacaccctcagccgctgccacaaatctctgatccgtatccatgatggtcatgtttatttctagtccgtatccagtcaacactatgttagcatttctgtcgatatagctttcactcatatgacactcaccaataatagtagaattaatgtcgtaatttacaccaatagtgagttcggcggcaaagtaccaataccggtaatcttgtcgaggaggacatatagtattcttgtattctaccgaatacccgagagatgcgatacaaaagagcaagactaatttgtaaaccatcttactcaaaatatgtaacaatagtacgatgcaatgagtaagacaataggaaatctatcttatatacacataattattctatcaattttaccaattagttagtgtaatgttaacaaaaatgtgggagaatctaattagtttttctttacacaattgacgtacatgagtctgagttccttgtttttgctaattatttcatccaatttattattcttgacgatatcgagatcttttgtataggagtcaaacttgtattcaacatgcttttctataatcattttagctatttcggcatcatccaatagtacattttccagattagcagaatagatattaatgtcgtatttgaacagagcctgtaacatctcaatgtctttattatctatagccaatttaatgtccggaatgaagagaagggaattattggtgtttgtcgacgtcatatagtcgagcaagagaatcatcatatccacgtgtccattttttatagtgatgtgaatacaactaaggagaatagccagatcaaaagtagatggtatctctgaaagaaagtaggaaacaatacttacatcattaagcatgacggcatgataaaatgaagttttccatccagttttcccatagaacatcagtctccaatttttcttaacaaacagttttaccgtttgcatgttaccactatcaaccgcataatacaatgcggtgtttcccttgtcatcaaattgtgaatcatccagtccactgaatagcaaaatctttactattttggtatcttccaatgtggctgcctgatgtaatggaaattcattctctagaagatttttcaatgctccagcgttcaacaacgtacatactagacgcacgttattatcagctattgcataatacaaggcactatgtccatggacatccgccttaaatgtatctttactagagagaaagcttttcagctgcttagacttccaagtattaattcgtgacagatccatgtctgaaacgagacgctaattagtgtatattttttcattttttataattttgtcatattgcaccagaattaataatatctttaatagatctgattagtagatacatggctatcgcaaaacaacatatacacatttaataaaaataatatttattaagaaaattcagatttcacgtacccatcaatataaataaaataatgattccttacaccgtacccatattaaggagattccaccttacccataaacaatataaatccagtaatatcatgtctgatgatgaacacaaatggtgtattaaattccagtttttcaggagatgatctcgccgtagctaccataatagtagatgcctctgctacagttccttgttcgtcgacatctatctttgcattctgaaacattttataaatatataatgggtccctagtcatatgtttaaacgacgcattatctggattaaacatactaggagccatcatttcggctatcgacttaatatccctcttattttcgatagaaaatttagggagtttaagattgtacactttattccctaattgagacgaccaatagtctaattttgcagccgtgatagaatctgtgaaatgggtcatattatcacctattgccaggtacatactaatattagcatccttatacggaaggcgtaccatgtcatattctttgtcatcgattgtgattgtatttccttgcaatttagtaactacgttcatcatgggaaccgttttcgtaccgtacttattagtaaaactagcattgcgtgttttagtgatatcaaacggatattgccatatacctttaaaatatatagtattaatgattgcccatagagtattattgtcgagcatattagaatctactacattagacataccggatctacgttctactatagaattaattttattaaccgcatctcgtctaaagtttaatctatataggccgaatctatgatattgttgataatacgacggtttaatgcacacagtattatctacgaaactttgataagttagatcagtgtacgtatatttagatgttttcagcttagctaatcctgatattaattctgtaaatgctggacccagatctctttttctcaaatccatagtcttcaataattctattctagtattacctgatgcaggcaatagcgacataaacatagaaaacgaataaccaaacggtgagaagacaatattatcatcttgaatatttttatacgctactataccggcattggtaaatccttgtagacgataggcggacgctgaacacgctaacgatagtatcaataacgcaatcatgattttatggtattaataattaaccttatttttatgttcggtataaaaaaattattgatgtctacacatccttttgtaattgacatctatatatccttttgtataatcaactctaatcactttaacttttacagttttccctaccagtttatccctatattcaacatatctatccatatgcatcttaacactctctgccaagatagcttcagagtgaggatagtcaaaaagataaatatatagagcataatcattctcgtatactctgccctttattacatcacccgcattgggcaacgaataacaaaatgcaagcatcttgttaacgggctcgtaaattgggataaaaattatgtttttattgtcttatatctattttattcaagagaatattcaggaatttctttttccggttgtatctcgtcgcagtatatatcatttgtacattgtttcatattttttaatagtttacaccttttagtaggactagtatcgtacaattcatagctgtattttgaattccaatcacgcataaaaatatcttccaattgttgacgaagacctaatccatcatccggtgtaatattaatagatgctccacatgtatccgtaaagtaatttcctgtccaatttgaggtacctatataggccgttttatcggttaccatatatttggcatggtttaccctagaatacggaatgggaggatcagcatctggtacaataaatagctttacttctatatttatgtttttagattttagcatagcgatagatcttaaaaagtttctcatgataaacgaagatcgttgccagcaactaatcaatagcttaacggatacttgtctgtctatagcggatcttcttaattcatcttctatataaggccaaaacaaaattttacccgccttcgaataaataatagggataaagttcataacagatacataaacgaatttactcgcatttctaatacatgacaataaagcggttaaatcattggttctttccatagtacatagttgttgcggtgcagaagcaataaatacagagtgtggaacgccgcttacgttaatactaagaggatgatctgtattataatacgacggataaaagtttttccaattatatggtagattgttaactccaagataccagtatacctcaaaaatttgagtgagatccgctgccaagttcctattattgaagatcgcaatacccaattccttgacctgagttagtgatctccaatccatgttagcgcttcctaaataaatatgtgtattatcagatatccaaaattttgtatgaagaactcctcctaggatatttgtaatatctatgtatcgtacttcaactccggccatttgtagtctttcaacatcctttaatggtttgttagatttattaacggctactctaactcgtactcctcttttgggtaattgtacaatctcgtttaatattatcgtgccgaaattcgtacccacttcatccgataaactccaataaaaagatgatatatctagtgtttttgtggtattggatagaatttccctccacatgttaaatgtagacaaatatactttatcaaattgcatacctataggaatagtttctgtaatcactgcgattgtattatccggattcattttatttgttaaaagaataatcctatatcacttcactctattaaaaatccaagtttctatttctttcatgactgattttttaacttcatccgtttccttatgaagatgatgtttggcaccttcataaatttttatttctctattacaatttgcatgttgcatgaaataatatgcacctaaaacatcgctaatcttattgtttgttccctggagtatgagagtcggggggtgttaatcttggaaattatttttctaaccttgttggtagccttcaagacctgactagcaaatccagccttaattttttcatgattgactaatgggtcgtattggtatttataaactttatccatatctctagatactgattctggacatagctttccgactggcgcatttggtgtgatggttcccataagtttggcagctagcagattcagtcttgaaacagcatctgcattaactagaggagacattagaatcattgctgtaaacaagtttggattatcgtaagaggctagctcccatggaatgacccaataagtagatttaatagttaccacgtgctgtaccaaagtcatcaatcatcattttttcaccattacttcttccatgtccaatatgatcatgtgagaatactaaaattcctaacgatgatatgttttcagctagttcgtcataacgtccagaatgtttaccagctccatgacttatgaatactaatgccttaggatatgtaataggtttccaatatttacaatatatgtaatcattgtccagattgaacatacagtttgcactcatgattcacgttatataactatcaatattaacagttcgtttgatgatcatattatttttatgttttattgataattgtaaaaacatacaattaaatcaatatagaggaaggagacggctactgtcttttgtaagatagtcatggcgactaaattagattatgaggatgctgttttttactttgtggatgatgataaaatatgtagtcgcgactccatcatcgatctaatagatgaatatattacgtggagaaatcatgttatagtgtttaacaaagatattaccagttgtggaagactgtacaaggaattgatgaagttcgatgatgtcgctatacggtactatggtattgataaaattaatgagattgtcgaagctatgagcgaaggagaccactacatcaattttacaaaagtccatgatcaggaaagtttattcgctaccataggaatatgtgctaaaatcactgaacattggggatacaaaaagatttcagaatctagattccaatcattgggaaacattacagatttgatgaccgacgataatataaacatcttgatactttttctagaaaaaaaattgaattgatgatataggggtcttcataacgcataattattacgttagcattctatatccgtgttaaaaaaaattatcctatcatgtatttgagagttttatatgtagcaaacatgatagctgtgatgccaataagctttagatattcacgcgtgctagtgttagggatggtattatctggtggtgaaatgtccgttatataatctacaaaacaatcatcgcatatagtatgcgatagtagagtaaacatttttatagtttttactggattcatacatcgtctacccaattcggttataaatgaaattgtcgccaatcttacacccaaccccttgttatccattagcatagtattaacttcgttatttatgtcataaactgtaaatgattttgtagatgccatatcatacatgatattcatgtccctattataatcattactaactttatcacaatatatgttgataatatctatatatgatctagtctttgtgggcaactgtctatacaagtcgtctaaacgttgtttactcatatagtatcgaacagccatcattacatggtcccgttccgttgatagataatcgagtatgttagtggacttgtcaaatctatataccatattttctggaagtggatatacatagtcgtgatcaacattattgctagcctcatcttctatatcctgtactataccattatctatatcatctacataatctatgatattattacacataaacatcgacaacatactattgtttattatctaagtcctgttgatccaaacccttgatctcctctatttgtactatctagagattgtacttcttccagttctggataatatatacgttgatagattagctgagctattctatctccagtatttacattaaacgtacattttccattattaataagaatgactcctatgtttcccctataatcttcgtctattacaccacctcctatatcaatgccttttagtgacagaccagacctaggagctattctaccatagcagaacttaggcatggacatactaatatctgtcttaattaactgtctttctcctggagggatagtataatcgtaagcgctatacaaatcatatccggcagcacccggcgattgcctagtaggagatttagctctgttagtttccttaacaaatctaactggtgagttaatattcatgttgaacataaaactaatattttatttcaaaattatttaccatcccatatattccatgaataagtgtgatgattgtacacttctatagtatctatatacgatccacgataaaatcctcctatcaatagcagtttattatccactatgatcaattctggattatccctcggataaataggatcatctatcagagtccatgtattgctggattcacaataaaattccgcatttctaccaaccaagaataaccttctaccgaacactaacgcgcatgatttataatgaggataataagtggatggtccaaactgccactgatcatgattgggtagcaaatattctgtagttgtatcagtttcagaatgtcctcccattacgtatataacattgtttatggatgccactgctggattacatctaggtttcagaagactcggcatattaacccaagcagcatccccgtggaaccaacgctcaacagatgtgggatttggtagacctcctactacgtataatttattgttagcgggtatcccgctagcatacagtctggggctattcatcggaggaattggaatccaattgtttgatatataatttacagctatagcattgttatgtatttcattgttcatccatccaccgatgagatatactacttctccaacatgagtacttgtacacatatggaatatatctataatttgatccatgttcataggatactctatgaatggatacttgtatgatttgcgtggttgtttatcacaatgaaatattttggtacagtctagtatccattttacattatttatacctctgggagaaagataatttgacctgattacatttttgataaggagtagcagatttcctaatttatttcttcgcctcatataccacttaatgacaaaatcaactacataatcctcatctggaacatttagttcatcgctttctagaataagtttcatagatagataatcaaaattgtctatgatgtcatcttccagttccaaaaagtgtttggcaataaagtttttagtatgacataagagattggatagtccgtattctatacccatcatgtaacactcgacacaatattcctttctaaaatctcgtaagataaagtttatacaagtgtagatgataaattctacagaggttaatatagaagcacgtaataaattgacgacgttatgactatctatatatacctttccagtatatgagtaaataactatagaagttaaactgtgaatgtcaaggtctagacaaacccttgtaactggatctttatttttcgtgtatttttgacgtaaatgtgtgcgaaagtaaggagataactttttcaatatcgtagaattgactattatattgcctcctatggcatcaataattgttttgaatttcttagtcatagacaatgctaatatattcttacagtacacagtattgacaaatatcggcatttatgtttctttaaaagtcaacatctagagaaaaatgattatctttttgagacataactcccattttttggtattcacccacacgtttttcgaaaaaattagtttttccttccaatgatatattttccatgaaatcaaacggattggtaacattataaatttttttaaatcccaattcagaaatcaatctatccgcgacgaattctatatatgttttcatcatttcacaattcattcctataagtttaactggaagagccgcagtaagaaattcttgttcaatggatactgcatctgttataatagatctaacggtttcttcactcggtggatgcaataaatgtttaaacatcaaacatgcgaaatcgcagtgcagaccctcgtctctactaattagttcgttggaaaacgtgagtccgggcattaggccacgctttttaagccaaaatatggaagcgaatgatccagaaaagaaaattccttctactgcagcaaaggcaataagtctctctccataaccggcgctgtcatgtatccacttttgagcccaatcggccttcttttttacacaaggcatcgtttctatggcattaaagagatagtttttttcattactatctttaacataagtatcgatcaaaagactatacatttccgaatgaatgttttcaatggccatctgaaatccgtagaaacatctagcctcggtaatctgtacttctgtacaaaatcgttccgccaaattttcattcactattccgtcactggctgcaaaaaacgccaatacatgttttataaaatatttttcgtctggtgttagtttattccaatcattgatatctttagatatatctacttcttccactgtccaaaatgatgcctctgcctttttatacatgttccagatgtcatgatattggattgggaaaataacaaatctatttggatttggtgcaaggatgggttccataactaaattaacaataacaataaattttttttcagttatctatatgcctgtacttggattttttgtacatcgatatcgccgcaatcactacaataattacaagtattattgatagcattgttattagtactatcataattaaattatctacattcatgggtgctgaataatcgttattatcatcattatcattttgtaattgtgacatcatactagataaatcgtttgcgagattgttgtgggaagcgggcatggaggatgcattatcattattatttaacgccttccatttggattcacaaatgttacgcacattcaacattttatggaaactataattttgtgaaaacaaataacaagaaaactcgtcatcgttcaaatttttaacgatagtaaaccgattaaacgtcgagctaatttctaacgctagcgactctgttggatatgggtttccagatatatatcttttcagttcccctacgtatctataatcatctgtaggaaatggaagatatttccatttatctactgttcctaatatcatatgtggtggtgtagtagaaccattaagcgcgaaagatgttatttcgcatcgtattttaacttcgcaataatttctggttagataacgcactctaccagtcaagtcaatgatattagcctttacagatatattcatagtagtcgtaacgatgactccatcttttagatgcgatactcctttgtatgtaccagaatcttcgtacctcaaactcgatatatttaaacaagttaatgagatattaacgcgttttatgaatgatgatatataaccagaagttttatcctcggtggctagcgctataaccttatcattataataccaactagtgtgattaatatgtgacacgtcagtgtgggtacaaatatgtacattatcgtctacgtcgtattcgatacatccgcatacagccaacaaatataaaatgacaaatactctaacgccgttcgtacccatcttgatgcggtttaataaatgttttgatttcaatttattgtaaaaaaagattcggttttatactgttcgatattctcattgcttatattttcatctatcatctccacacagtcaaatccgtggttagcatgcacctcatcaaccggtaaaagactatcggactcttctatcattataactctagaatatttaatttggtcattattaatcaagtcaattatcttatttttaacaaacgtgagtattttactcattttttataaaaacttttagaaatatacagactctatcgtgtgtctatatcttctttttatatccaatgtatttatgtctgatttttcttcatttatcatatataatggtccaaattctacacgtgcttcggattcatccagatcattaaggttcttataattgtaacatccttctcttccctcttctacatcttccttcttattcttattcttagcgtcacagaatctaccacagcaggatcccatgacgagcgtcatattaaactaatccattttcaattataatatatgattagtaatgaccattaaaataaaaaatattcttcataaccggcaagaaagtgaaaagttcacattgaaactatgtcagtagtatacatcatgaaatgatgatatatatatactctattttggtggaggattatatgatataattcgtggataatcatttttaagacacatttctttattcgtaaatcttttcacgttaaatgagtgtccatattttgcaatttcttcatatgatggcggtgtacgtggacgaggctgctcctgttcttgttgtggtcgccgactgtcgtgtctgcgtttagatccctccattatcgcgattgcgtagatggagtactattttataccttgtaattaaatttttttattaattaaacgtataaaaacgttccgtatctgtatttaagagccagatttcgtctaatagaacaaatagctacagtaaaaataactagaataattgctacacccactagaaaccacggatcgtaatacggcaatcggttttcgataataggtggaacgtatattttatttaaggacttaacaattgtctgtaaaccacaatttgcttccgcggatcctgtattaactatctgtaaaagcatatgttgaccgggcggagccgaacattctccgatatctaatttctgtatatctataatattattaacctccgcatacgcattacagttcttttctagcttggataccgcactaggtacatcgtctagatctattcctatttcctcagcgatagctcttctatccttttccggaagcaatgaaatcacttcaataaatgattcaaccatgagtgtgaaactaagtcgagaattactcatgcatttgttagttattcggagcgcgcaatttttaaactgtcctataacctctcctatatgaatagcacaagtgacattagtagggatagaatgttgagctaatttttgtaaataactatctataaaaagattatacaaagttttaaactctttagtttccgccatttatccagtctgagaaaatgtctctcataataaatttttccaagaaactaattgggtgaagaatggaaacctttaatctatatttatcacagtctgttttggtacacatgatgaattcttccaatgccgtactaaattcgatatctttttcgatttctggatatgtttttaataaagtatgaacaaagaaatggaaatcgtaataccagttatgtttaactttgaaattgttttttattttcttgttaatgattccagccacttgggaaaagtcaaagtcgtttaatgccgatttaatacgttcattaaaaacaaactttttatcctttagatgaattattattggttcattggaatcaaaaagtaagatattatcgggtttaagatctgcgtgtaaaaagttgtcgcaacagggtagttcgtagattttaatgtataacagagccatctgtaaaaagataaactttatgtattgtaccaaagatttaaatcctaatttgatagctaactcggtatctactttatctgccgaatacagtgctaggggaaaaattataatgtttcctctttcatattcgtagttagttctcttttcatgttcgaaaaagtgaaacatgcggttaaaatagtttataacattaatattactgttaataactgccggataaaagtgggatagtaatttcacgaatttgatactgtcctttctctcgttaaacgcctttaaaaaaactttagaagaatatctcaatgagagttcctgaccatccatagtttgtatcaataatagcaacatatgaagaacacgtttatacagagtatgtaaaaatgttaatttatagtttaatcccatggcccacgcacacacgattaattttttttcatctccctttagattgttgtatagaaatttgggtactgtgaactccgccgtagtttccatgggactatataattttgtggcctcgaatacaaattttactacatagttatctatcttaaagactataccatatcctcctgtagatatgtgataaaaatcgtcgtttataggataaaatcgtttatccttttgttggaaaaaggatgaattaatgtaatcattctcttctatctttagtagtgtttccttattaaaattcttaaaataatttaacaatctaactgacggagcccaattttggtgtaaatctaattgggacattatattgttaaaatacaaacagtctcctaatataacagtatctgataatctatggggagacatccattgatattcaggggatgaatcattggcaacacccatttattgtacaaaaagccccaatttacaaacgaaagtccaggtttgatagagacaaacaattaactattttgtctctgtttttaacacctccacagtttttaatttctttagtaatgaaattattcacaatatcagtatcttctttatctaccagagattttactaacttgataaccttggctgtctcattcaatagggtagtaatatttgtatgtgtgatattgatatctttttgaattgtttcttttagaagtgattctttgatggtgccagcatacgaattacaataatgcagaaactcggttaacatgcaggaattatagtaagccaattccaattgttgcctgtgttgtattagagtgtcaatatgagcaatggtgtccttgcgtttctctgatagaatgcgagcagcgattttggcgttatcatttgacgatatttctggaatgacgaatcctgtttctactaactttttggtaggacaaagtgaaacaatcaagaagatagcttctcctcctatttgtggaagaaattgaactcctctagatgatctactgacgatagtatctccttgacagatattggaccgaattacagaagtacctggaatgtaaagccctgaaaccccctcattttttaagcagattgttgccgtaaatcctgcactatgcccaagatagagagctcctttggtgaatccatctctatgtttcagtttaaccaagaaacagtcagctggtctaaaatttccatctctatctaatacagcatctaacttgatgtcaggaactatgaccggtttaatgttatatgtaacattgagtaaatccttaagttcataatcatcactgtcatcagttatgtacgatccaaacaatgtttctaccggcatagtggatacgaagatgctatccatcagaatgtttccctgattagtattttctatatagctattcttctttaaacgattttccaaatcagtaactatgttcatttttttaggagtaggacgcctagccagtatggaagaggattttctagatcctctcttcaacatctttgatctcgatggaatgcaaaaccccatagtgaaacaaccaacgataaaaataatattgtttttcactttttataattttaccatctgactcatggattcattaatatctttataagagctactaacgtataattctttataactgaactgagatatatacaccggatctatggtttccataattgagtaaatgaatgctcggcaataactaatggcaaatgtatagaacaacgaaattatactagagttgttaaagttaatattttctatgagctgttccaataaattatttgttgtgactgcgttcaagtcataaatcatcttgatactatccagtaaaccgtttttaagttctggaatattatcatcccattgtaaagcccctaattcgactatcgaatatcctgctctgatagcagtttcaatatcgacggacgtcaatactgtaataaaggtggtagtattgtcatcatcgtgataaactacgggaatatggtcgttagtaggtacggtaactttacacaacgcgatatataactttccttttgtaccatttttaacgtagttgggacgtcctgcagggtattgttttgaagaaatgatatcgagaacagatttgatacgatatttgttggattcctgattattcactataatataatctagacagatagatgattcgataaatagagaaggtatatcgttggtaggataatacatccccattccagtattctcggatactctattgatgacactagttaagaacatgtcttctattctagaaaacgaaaacatcctacatggactcattaaaacttctaacgctcctgattgtgtctcgaatgcctcgtacaaggatttcaaggatgccatagattctttgaccaacgatttagaattgcgtttagcatctgatttttttattaaatcgaatggtcggctctctggtttgctaccccaatgataacaatagtcttgtaaagataaaccgcaagaaaatttatacgcatccatccaaataaccctagcaccatcggatgatattaatgtattattatagattttccatccacaattattgggccagtatactgttagcaacggtatatcgaatagattactcatgtaacctactagaatgatagttcgtgtactagtcataatatctttaatccaatctaaaaaatttaaaattagattttttacactgttaaagttaacaaaagtattacccgggtacgtggatatcatatatggcattggtccattatcagtaatagctccataaactgatacggcgatggtttttatatgtgtttgatctaacgaggaagaaattcgcgcccacaattcatctctagatatgtatttaatatcaaacggtaacacatcaatttcgggacgcgtatatgtttctaaatttttaatccaaatataatgatgacctatatgccctattatcatactgtcaactatagtacacctagggaacttacgatacatctgtttcctataatcgttaaattttacaaatctataacatgctaaaccttttgacgacagccattcattaatttctgatatggaatctgtattctcgataccgtatcgttctaaagccagtgctatatctccctgttcgtgggaacgctttcgtataatatcgatcaacggataatctgaagtttttggagaataatatgactcatgatctatttcgtccataaacaatctagacataggaattggaggcgatgatcttaattttgtgcaatgagtcgtcaatcctataacttctaatcttgtaatattcatcatcgacataatactatctatgttatcatcgtatattagtataccatgaccttcttcatttcgtgccaaaatgatatacagtcttaaatagttacgcaatatctcaatagtttcataattgttagctgttttcatcaaggtttgtatcctgtttaacatgatggcgttctataacgtctctattttctatttttaattttttaaatttttaacgatttactgtggctagatacccaatctctctcaaatatttttttagcctcgcttacaagctgtttatctatactattaaaactgacgaatccgtgattttggtaatgggttccgtcgaaatttgccgaagtgatatgaacatattcgtcgtcgactatcaacaattttgtattattctgaatagtgaaaaccttcacagatagatcattttgaacacacaacgcatctagacttttggcggttgccatagaatatacgtcgttcttatcccaattaccaactagaagtctgatcttaactcctctattaatggctgcttctataatggagttgtaaatgtcgggccaatagtagctattaccgtcgacacgtgtagtgggaactatggccaaatgttcaatatctatactagtcttagctgacctgagtttatcaataactacatcggtatctagatctctagaatatcccaataggtgttccggagaatcagtaaagaacactccacctataggattcttaatatgatacgcagtgctaactggcaaacaacaagccgcagagcataaattcaaccatgaattttttgcgctattaaaggctttaaaagtatcaaatcttctacgaagatctgtggccagcgggggataatcagaatatacacctaacgttttaatcgtatgtatagatcctccagtaaatgacgcgtttcctacataacatctttcatcatctgacacccaaaaacaaccgagtagtagtcccacattattttttttatctatattaacggttataaaatttatatccgggcagtgactttgtagctctcccagatttcttttccctcgttcatctagcaaaactattattttaatccctttttcagatgcctcttttagtttatcaaaaataagcgctcccctagtcgtactcagaggattacaacaaaaagatgctatgtatatatatttcttagctagagtgataatttcgttaaaacattcaaatgttgttaaatgatcggatctaaaatccatattttctggtagtgtttctaccagcctacattttgctcccgcaggtaccgatgcaaatggccacatttagttaacataaaaacttatacatcctgttctatcaacgattctagaatatcatcggctatatcgctaaaattttcatcaaagtcgacatcacaacctaactcagtcaatatattaagaagttccatgatgtcatcttcgtctatttctatatccgtatccattgtagattgttgaccgattatcgagtttaaatcattactaatactcaatccttcagaatacaatctgtgtttcattgtaaatttataggcggtgtatttaagttggtagattttcaattatgtattaatatagcaacagtagttcttgctcctccttgattctagcatcctcttcattattttcttctacgtacataaacatgtccaatacgttagacaacacaccgacgatggcggccgcaggatcctgcgaagcttacagacacgaatatgactaaaccgatgaccatttaaaaacccctctctagctttcacttaaactgtatcgatcattcttttagcacatgtataatataaaaacattattctatttcgaatttaggcttccaaaaatttttcatccgtaaaccgataataatatatatagacttgttaatagtcggaataaatagattaatgcttaaactatcatcatctccacgattagagatacaatatttacattctttttgctgtttcgaaactttatcaatacacgttaatacaaacccaggaaggagatattgaaactgaggctgttgaaaatgaaacggtgaatacaataattcagataatgtaaaatcatgattccgtattctgatgatattagaactgctaatggatgtcgatggtatgtatctaggagtatctattttaacaaagcatcgatttgctaatatacaattatccttttgattaattgttattttattcatattcttaaaaggtttcatatttatcaattcttctacattaaaaatttccatttttaatttatgtagccccgcaatactcctcattacgtttcattttttgtctataatatccattttgttcatctcggtacatagattatccaattgagaagcgcatttagtagttttgtacattttaagtttattgacgaatcgtcgaaaactagttatagttaacattttattatttgataccctgatattaatacccctgccgttactattatttataactgatgtaatccacgtaacattggaattaactatcgatagtaatgcatcgacgcttccaaaattgtctattataaactcaccgataatttttttattgcatgttttcatattcattaggattatcaaatctttaatcttattacgattgtatgcgttgatattacaagacgtcattctaaaagacggaggatctccatcaaatgccagacaatcacgtacaaagtacatggaaataggttttgttctattgcgcatcatagatttatatagaacacccgtagaaatactaatttgttttactctataaaatactaatgcatctatttcatcgttttgtataacgtctttccaagtgtcaaattccaaatttttttcattgatagtaccaaattcttctatctctttaactacttgcatagataggtaattacagtgatgcctacatgccgttttttgaaactgaatagatgcgtctagaagcgatgctacgctagtcacaatcaccactttcatatttagaatatatatatgtaaaaatatagtagaatttcattttgtttttttctatgctataaatgaattctcattttgcatctgctcatactccgttttatattaataccaaagaaggaagatatctggttctaaaagccgttaaagtatgcgatgttagaactgtagaatgcgaaggaagtaaagcttcctgcgtactcaaagtagataaaccctcatcgcccgcgtgtgagagaagaccttcgtccccgtccagatgcgagagaatgaataaccctggaaaacaagttccgtttatgaggacggacatgctacaaaatatgttcgcggctaatcgcgataatgtagcttctagacttttgtcctaaaatactattatatccttttcgatattaataaatccgtgtcgtccaggttttttatctctttcagtatgtgaatagataggtattttatctctattcatcatcgaatttaagagatccgataaacattgtttgtattctccagatgtcagcatctgatacaacaatatatgtgcacataaacctctggcacttatttcatgtaccttccccttatcactaaggagaatagtatttgagaaatatgtatacatgatattatcatgaattagatatacagaatttgtaacactctcgaaatcacacgatgtgtcggcgttaagatctaatatatcactcgataacacattttcatctagatacactagacattttttaaagctaaaatagtctttagtagtaacagtaactatgcgattattttcatcgatgatacatttcatcggcatattattacgcttaccatcaaagactataccatgtgtatatctaacgtattctagcatggttgccatacgcgcattaaacttttcaggatctttggatagatcttccaatctatctatttgagaaaacatttttatcatgttcaatagttgaaacgtcggatccactatatagatattatctataaagattttaggaactacgttcatggtatcctggcgaatattaaaactatcaatgatatgattatcgttttcatcttttatcaccatatagtttctaagatatgggattttacttaatataatattatttcccgtgataaattttattagaaaggccaaatctataagaaaagtcctagaattagtctgaagaatatctatatcgccgtatagtatatttggattaattagatatagagaatatgatccgtaacatatacaacttttattatggcgtctaagatattcttccatcaacttattaacatttttgactagggaagatacattatgacgtcccattacttttgccttgtctattactgcgacgttcatagaatttagcatatctcttgccaattcttccattgatgttacattataagaaattttagatgaaattacatttggagctttaatagtaagaactcctaatatgtccgtgtatgtggtcactaatacagattgtagttctataatcgtaaataatttacctatattatatgtttgagtctgtttagaaaagtagctaagtatacgatcttttatttctgatgcagatgtattaacatcggaaaaaaatctttttttattcttttttactaaagatacaaatatgtctttgttaaaaacagttattttctgaatatttctagcttgtaattttaacatatgatattcgttcacactaggtactctgcctaaataggtttctataatctttaatgtaatattaggaaaagtattctgatcaggattcctattcattttgaggatttaaaactctgattattgtctaatatggtctctacgcaaactttttcacagagcgatagagtttttgataactcgtttttcttaagaaatataaaactactgtctccagagctcgctctatcttttattttatctaattcgatacaaactcctgatactggttcagaaagtaattcattaattttcagtcctttatagaagatatttaatatagataatacaaaatcttcagtttttgatatcgatctgattgatcctagaactagatatattaataacgtgctcattaggcagtttatggcagcttgataattagatatagtatattccagttcatatttattagataccgcattgcccagattttgatattctatgaattcctctgaaaataaatccaaaataactagacattctattttttgtggattagtgtactctcttccctctatcatgttcactactggtgtccacgatgataaatatctagagggaatataatatagtccataggatgccaatctagcaatgtcgaataactgtaattttattcttcgctcttcattatgaattgattcttgaggtataaacctaacacaaattatattattagacttttcgtatgtaatgtctttcatgttataagtttttaatcctggaatagaatctattttaatgaggcttttaaacgcagagttctccaacgagtcaaagcataatactctgttgtttttcttatatacgatgttacgattttcttctttgaatggaataggtttttgaattagtttataattacaacataatagataaggaagtgtgcaaatagtacgcggaaaaaacataatagctcccctgttttcatccatggttttaagtaaatgatcactggcttctttagtcaatggatattcgaacattaaccgtttcatcatcattggacagaatccatatttcttaatgtaaagagtgatcaaatcattgtgtttattgtaccatcttgttgtaaatgtgtattcggttatcggatctgctcctttttctattaaagtatcgatgtcaatctcgtctaagaattcaactatatcgacatatttcatttgtatacacataaccattactaacgtagaatgtataggaagagatgtaacgggaacagggtttgttgattcgcaaactattctaatacataattcttctgttaatacgtcttgcacgtaatctattatagatgccaagatatctatataattattttgtaagatgatgttaactatgtgatctatataagtagtgtaataattcatgtattttgatatatgttccaactctgtctttgtgatgtctagtttcgtaatatctatagcatcctcaaaaaatatattcgcatatattcccaagtcttcagttctatcttctaaaaaatcttcaacgtatggaatataataatctattttacctcttctgatatcattaatgatatagtttttgacactatcttctgtcaattgattcttattcactatatctaagaaacggatagcgtccctaggacgaactactgccattaatatctctattatagcttctggacataattcatctattataccagaattaatgggaactattccgtatctatctaacatagttttaagaaagtcagaatctaagacttgatgttcatatattggttcatacatgaaatgatctctattgatgatagtgactatttcattctctgaaaattggtaactcattctatatatgctttccttgttgatgaaggatagaatatactcaatagaatttgtaccaacaaactgttctcttatgaatcgtatatcatcatctgaaataatcatgtaaggcatacatttaacaattagagacttgtctcctgttatcaatatactattcttgtgataatttatgtgtgaggcaaatttgtccacgttctttaattttgttatagtagatatcaaatccaatggagctacagttcttggcttaaacagatatagtttttctggaacaaattctacaacattattataaaggactttgggtagataagtgggatgaaatcctattttaattaatgcgatagccttgtcctcgtgcagatatccaaacgcttttgtgatagtatggcattcattgtctagaaacgctctacgaatatctgtgacagatatcatctttagagaatatactagtcgcgttaatagtactacaatttgtattttttaatctatctcaataaaaaaattaatatgtatgattcaatgtataactaaactactaactgttattgataactagaatcagaatctaatgatgacgtaaccaagaagtttatctactgccaatttagctgcattatttttagcatctcgtttagattttccatcggccttatcgaatactcttccgtcgatgtctacacaggcataaaatgtaggagagttactaggcccaactgattcaatacgaaaagaccaatctctcctagtaatttggcagtactcattaataacggtgacagggttagcatctttccaatcaataatttttttagccggaataacatcatcaaaagacttatgatcctctctcattgatttttcgcgggatacatcatctattatgacgtcagccatagcatcagcatccggcttatccgcctccgttgtcataaaccaacgaggaggaatatcgtcggagctgtacaccatagcactacgttgaagatcgtacagagctttattaacttctcgcttctccatattaagttgtctagttagttgtgcagcagtagctccttcgattccaatgtttttaatagccgcacacacaatctctgcgtcagaacgctcgtcaatatagatcttagacatttttagagagaactaacgcaaccagcaataaaactgaacctactttatcatttttttattcatcatcctctggtggttcgtcgttcctatcaaatgtagctctgattaacccgtcatctataggtgatgctggttctggagattctggaggagatggattattatctggaagaatctctgttatttccttgttttcatgtatcgattgcgttgtaacattaagattgcgaaatgctctaaatttgggaggcttaaagtgttgtttgcaatctctacacgcgtgtctaactagtggaggttcgtcagctgctctagtttgaatcatcatcggcgtagtattcctacttttacagttaggacacggtgtattgtatttctcgtcgagaacgttaaaataatcgttgtaactcacatcctttattttatctatattgtattctactcctttcttaatgcattttataccgaataagagatagcgaaggaattctttttcggtgccgctagtacccttaatcatatcacatagtgttttatattccaaatttgtggcaatagacggtttatttctatacgatagtttgtttctggaatcctttgagtattctataccaatattattctttgattcgaatttagtttcttcgatattagattttgtattacctatattcttgatgtagtactttgatgatttttccatggcccattctattaagtcttccaagttggcatcatccacatattgtgatagtaattctcggatatcagtagcggctaccgccattgatgtttgttcattggatgagtaactactaatgtatacattttccatttataacacttatgtattaactttgttcatttatattttttcattattatgttgatattaacaaaagtgaatatatatatgttaataattgtattgtggttatacggctacaattttataatgagtgaaagtcagtgtccgatgatcaatgacgatagctttactctgaaaagaaagtatcaaatcgatagtgcggagtcaacaataaaaatggataagaagaggataaagtttcagaatagagccaaaatggtaaaagaaataaatcagacaataagagcagcacaaactcattacgagacattgaaactaggatacataaaatttaagagaatgattatgactactactctagaagatatagcaccatctattccaaataatcagaaaacttataaactattctcggacatttcagccatcggcaaagcatcacagaatccgagtaagatggtatatgctctgctgctttacatgtttcccaatttgtttggagatgatcatagattcattcgttatagaatgcatccaatgagtaaaatcaaacacaagatcttctctcctttcaaacttaatcttattagaatattagtggaagaaagattctataataatgaatgcagatctaataaatggagaataattggaacacaagttgataaaatgttgatagctgaatctgataaatatacaatagatgcaaggtataacctaaaacccatgtatagaatcaagggagaatctgaagaagataccctctttatcaaacagatggtagaacaatgtgtgacatcccaggaattggtggaaaaagtgttgaagatactgtttagagatttgttcaagagtggagaatacaaagcgtacagatacgatgatgatgtagaaaatggatttattggattggatacactaaaattaaacattgttcatgatatagttgaaccatgtatgcctgttcgtaggccagtggctaagatactgtgtaaagaaatggtaaataaatactttgagaatccgctacatattattggtaaaaatcttcaagagtgcattgactttgttagtgaataggcatttcatctttctccaatactaattcaaattgttaaattaataatggatagtataaatagttattagttataagatagtaaaaataattattagaataagagtgtagtatcatagataactctcttctataaaaatggattttattcgtagaaagtatcttatatacacagtagaaaataatatagattttttaaaggatgatacattaagtaaagtaaacaattttaccctcaatcatgtactagctctcaagtatctagttagcaattttcctcaacacgttattactaaggatgtattagctaataccaatttttttgttttcatacatatggtacgatgttgtaaagtgtacgaagcggttttacgacacgcatttgatgcacccacgttgtacgttaaagcattgactaagaattatttatcgtttagtaacgcaatacaatcgtacaaggaaaccgtgcataaactaacacaagatgaaaaatttttagaggttgccgaatacatggacgaattaggagaacttataggcgtaaattatgacttagttcttaatccattatttcacggaggggaacccatcaaagatatggaaatcatttttttaaaactgtttaagaaaacagacttcaaagttgttaaaaaattaagtgttataagattacttatttgggcatacctaagcaagaaagatacaggcatagagtttgcggataatgatagacaaaatatatacactctatttcaacaaactggtagaatcgtccatagcaatctaacagaaacgtttagagattatatctttcccggagataagactagctattgggtgtggttaaacgaaagtatagctaatgatgcggatatcgttcttaatagacacgccattaccatgtatgataaaattcttagttatatatactctgagataaaacaaggacgcgttaataaaaacatgcttaagttagtttatatctttgagcctgaaaaagatatcagagaacttctgctagaaatcatatatgatattcctggagatatcctatctattattgatgcaaaaaacgacgattggaaaaaatattttattagtttttataaagctaattttattaacggtaatacatttattagtgatagaacgtttaacgaggacttattcagagttgttgttcaaatagatcccgaatatttcgataatgaacgaattatgtctttattctctacgagtgctgcggacattaaacgatttgatgagttagatattaataacagttatatatctaatataatttatgaggtgaacgatatcacattagatacaatggatgatatgaagaagtgtcaaatctttaacgaggatacgtcgtattatgttaaggaatacaatacatacctgtttttgcacgagtcggatcccatggtcatagagaacggaatactaaagaaactgtcatctataaaatccaagagtagacggctgaacttgtttagcaaaaacattttaaaatattatttagacggacaattggctcgtctaggtcttgtgttagatgattataaaggagacttgttagttaaaatgataaaccatcttaagtctgtggaggatgtatccgcattcgttcgattttctacagataaaaaccctagtattcttccatcgctaatcaaaactattttagctagttataatatttccatcatcgtcttatttcaaaggtttttgagagataatctatatcatgtagaagaattcttggataaaagcatccatctaaccaagacggataagaaatatatacttcaattgataagacacggtagatcatagaacagaccaaatatattattaataatttgtatatacatagatataattatcacacatttttgataaatgggaactgctgcaacaattcagactcccaccaaattaatgaataaagaaaatgcagaaatgattttggaaaaaattgttgatcatatagttatgtatattagtgacgaatcaagtgattcagaaaataatcctgaatatattgattttcgtaacagatacgaagactatagatctctcattataaaaagtgatcacgagtttgtaaagctatgtaaaaatcatgcggagaaaagttctccagaaacgcaacaaatgattatcaaacacatatacgaacaatatcttattccagtatctgaagtactattaaaacctataatgtccatgggtgacataattacatataacggatgtaaagacaatgaatggatgctagaacaactctctaccctaaactttaacaatctccgcacatggaactcatgtagcataggcaatgtaacgcgtctgttttatacattttttagttatctgatgaaagataaactaaatatataagtataatcccattctaatactttaacctgatgtattagcatcttattagaatattaacctaactaaaagacataacataaaaactcattacatagttgataaaaagcggtaggatataaatattatggctgccaccgttccgcgttttgacgacgtgtacaaaaatgcacaaagaagaattctagatcaagaaacattttttagtagaggtctaagtagaccgttaatgaaaaacacatatctatttgataattacgcgtatggatggataccagaaactgcaatttggagtagtagatacgcaaacctagatgctagtgactattatcccatttcgttgggattacttaaaaagttcgagtttctcatgtctctatataaaggtcctattcccgtatatgaagaaaaagtaaatactgaattcatagccaatggatcgttctctggtagatacgtatcatatcttcgaaagttttctgcccttccaacaaacgagtttattagttttttgttactgacttccattccaatctataatatcttgttctggtttaaaaacacacagtttgatattactaaacacacattattcagatacgtctatacagataatgccaaacacctggcgttggctaggtatatgcatcaaacaggagactataagcctttgtttagtcgtctcaaagagaattatatatttaccggtcccgttccaataagtatcaaagatatagatcaccctaatcttagtagagcaagaagtccatccgattatgagacattagctaatattagtactatattgtactttaccaagtatgatccggtattaatgtttttattgttttacgtacctgggtattcaattactacaaaaattactccagccgtagaatatctaatggataaactgaatctaacaaagagcgacgtacaactgttgtaaattattttatgcttcgtaaaatgtaggttttgaaccaaacattctttcaaagaatgagatgcataaaactttattatccaatagattgactatttcggacgtcaatcgtttaaagtaaacttcgtaaaatattctttgatcactgccgagtttaaaacttctatcgataattgtctcatatgttttaatatttacaagttttttggtccatggtacattagccggacaaatatatgcaaaataatatcgttctccaagttctatagtttctggattatttttattatattcagtaactaaatacatattagggttatctgcggatttataatttgagtgatgcattctactcaacataaataattctagaggagacgatctactatcaaattcggatcgtaaatctgtttctaaagaacggagaatatctatacatacctgattagaattcatccgtccttcagacaacatctcagacagtctggttttgtacatcttaatcatattcttatgaaacttggaaacatctcttctagtttcactagtacctttattaattctctcaggtacagattttgaattcgacgatgctgagtatttcatcgttgtatatttcttcttcgattgcataatcagattcttatataccgcctcaaactctattttaaaattattaaacaatactctattattaatcagtcgttctaactctttcgctatttctatagacttatctacatcttgactgtctatctctgtaaacacggagtcggtatctccatacacgctacgaaaacgaaatctgtaatctataggcaacgatgttttcacaatcggattaatatctctatcgtccatataaaatggattacttaatggattggcaaaccgtaacataccgttagataactctgctccatttagtaccgattctagatacaagatcattctacgtcctatggatgtgcaactcttagccgaagcgtatgagtatagagcactatttctaaatcccatcagaccatatactgagttggctactatcttgtacgtatattgcatggaatcatagatggccttttcagttgaactggtagcctgttttagcatctttttatatctggctctctctgccaaaaatgttcttaatagtctaggaatggttccttctatcgatctatcgaaaattgctatttcagagatgaggttcggtagtctaggttcacaatgaaccgtaatatatctaggaggtggatatttctgaagcaatagctgattatttatttcttcttccaatctattggtactaacaacgacaccgactaatgtttccggagatagatttccaaagatacacacattaggatacagactgttataatcaaagattaatacattattactaaacattttttgttttggagcaaataccttaccgccttcataaggaaacttttgttttgtttctgatctaactaagatagttttagtttccaacaatagctttaacagtggacccttgatgactgtactcgctctatattcgaataccatggattgaggaagcacatatgttgacgcacccgcgtctgtttttgtttctactccataatactcccacaaatactgacacaaacaagcatcatgaatacagtatctagccatatctaaagctatgtttagattataatccttatacatctgagctaaatcaacgtcatcctttccgaaagataatttatatgtatcattaggtaaagtaggacataatagtacgactttaaatccattttcccaaatatctttacgaattactttacatataatatcctcatcaacagtcacataattacctgtggttaaaacctttgcaaatgcagcggctttgcctttcgcgtctgtagtatcgtcaccgatgaacgtcatttctctaactcctctatttaatactttacccatgcaactgaacgcgttcttggatatagaatccaatttgtacgaatccaatttttcaaatttttgaatgaatgaatatagatcgaaaaatatagttccattattgttattaacgtgaaacgtagtattggccatgccgcctactcccttatgactagactgatttctctcataaatacagagatgtacagcttcctttttgtccggagatctaaagataattttctctcctgttaataactctagacgattagtaatatatctcagatcaaagttatgtccgttaaaggtaacgacgtagtcgaacgttagttccaacaattgtttagctattcgtaacaaaactatttcagaacatagaactagttctcgttcgtaatccatttccattagtgactgtatcctcaaacatcctctatcgacggcttcttgtatttcctgttccgttaacatctcttcattaatgagcgtaaacaataatcgtttaccacttaaatcgatataacagtaacttgtatgcgagattgggttaataaatacagaaggaaacttcttatcgaagtgacactctatatctagaaataagtacgatcttgggatatcgaatctaggtatttttttagcgaaacagttacgtggatcgtcacaatgataacatccattgttaatctttgtcaaatattgctcgtccaacgagtaacatccgtctggagatatcccgttagaaatataaaaccaactaatattgagaaattcatccatggtggcattttgtatgctgcgtttctttggctcttctatcaaccacatatctgcgacggagcattttctatctttaatatctagattataacttattgtctcgtcaatgtctatagttctcatctttcccaacggcctcgcattaaatggaggaggagacaatgactgatatatttcgtccgtcactacgtaataaaagtaatgaggaaatcgtataaatacggtctcgccatttcgacatctggatttcagatataaaaatctgttttcaccgtgactttcaaaccaattaatgcaccgaacatccatttatagaatttagaaatatattttcatttaaatgaatcccaaacattggggaagagccgtatggaccattatttttatagtactttcgcaagcgggtttagacggcaacatagaagcgtgtaaacgaaaactatatactatagttagcactcttccatgtcctgcatgtagacggcacgcgactatcgctatagaggacaataatgtcatgtctagcgatgatctgaattatatttattattttttcatcagattatttaacaatttggcatctgatcccaaatacgcgatcgatgtgacaaaggttaaccctttataaacttaacccattataaaacttatgattagtcacaactgaaataaccgcgtgattattttttggtataattctacacggcatggtttctgtgactatgaattcaacccccgttacattagtgaaatctttaacaaacagcaagggttcgtcaaagacataaaactcattgtttacaatcgaaatagaccccctatcacacttaaaataaaaaatatccttatcctttaccaccaaataaaattctgattggtcaatgtgaatgtattcacttaacagttccacaaatttatttattaactccgaggcacatacatcgtcggtattttttatggcaaactttactcttccagcatccgtttctaaaaaaatattaacgagttccatttatatcatccaatattattgaaatgacgttgatggacagatgatacaaataagaaggtacggtacctttgtccaccatctcctccaattcatgctctattttgtcattaactttaatgtatgaaaacagtacgccacatgcttccatgacagtgtgtaacactttggatacaaaatgtttgacattagtataattgtccaagactgtcaatctataatagatagtagctataatatattctatgatggtattgaagaagatgacaaccttggcatattgatcatttaacacagacatggtatcaacagatagcttgaatgaaagagaatcagtaattggaataagcgtcttctcgatagagtgtccgtataccaacatgtctgatattttgatgtattccattaaattatttagttttttctttttattctcgttaaacagcatttctgtcaacggaccccaacatcgttgaccgattaagttttgattgatttttccgtgtaaggcgtatctagtcagatcgtatagcctatccaataatccatcgtctgtgtgtagatcacatcgtacactttttaattctctatagaagagcgacagacatctggagcaattacagacagcaatttctttattctctacagatgtaagatacttgaagacattcctatgatgatgcagaattttggataacacggtattgatggtatctgttaccataattcctttgatggctgatagtgtcagagcacaagatttccaatctttgacaatttttagcaccattatctttgttttgatatctatatcagacagcatggtgcgtctgacaacacagggattaagacggaaagatgaaatgattctctcaacatcttcaatagataccttgctattttttctggcattatctatatgtgcgagaatatcctctagagaatcagtatcctttttgatgatagtggatctcaatgacatgggacgtttaaaccttcttattctatcaccagattgcatggtgatttgtcttctttcttttatcataatgtaatctctaaattcatcggcaaattgtctatatctaaaatcataatatgagatgtttacctctacaaatatctgttcgtccaatgttagagtatttacatcagttttgtattccaaattaaacatggcaacggatttaattttatattcctctattaagtcctcgtcgataataacagaatgtagataatcatttaatccgtcgtacatggttggaagatgcttgttgacaaaatctttaattgtcttgatgaaggtgggactatatctaacatcttgattaataaaatttataacattgtccataggatactttgtaactagttttatacacatctcttcatcggtaagtttagacagaatatcgtgaacaggtggtatattatattcatcagatatacgaagaacaatgtccaaatctatattgtttaatatattatatagatgtagcgtagctcctacaggaatatctttaactaagtcaatgatttcatcaaccgttagatctattttaaagttaatcatataggcattgatttttaaaaggtatgtagccttgactacattctcattaattaaccattccaagtcattgtgtgtaagaagattatattctatcataagcttgactacatttggtcccgataccattaaagaattcttatgatataaggaaacagattttaggtactcatctactctacaagaattttggagagccttaacgatatcagtgacgtttattatttcaggaggaaagaatctaacattgagaatatcggaattaatagcttccagatacagtgattttggcaatagtccgtgtaatccataatccagtaacacgagctggtgcttgctagacaccttttcaatgtttaatttttttgaaataagctttgataaagccttcctcgcaaattccggatacatgaacatgtcggcgacatgattaagtattgttttttcattatttttatattttctcaacaagttctcaataccccaatagatgatagaatatcacccaatgcgtccatgttgtctatttccaacaggtcgctatatccaccaatagaagtttttccaaaaaagattctaggaacagttctaccaccagtaatttgttcaaaataatcccgcaattcattttcgggtttaaattctttaatatcgacaatttcatacgctcctcttttgaaactaaacttatttagaatatccagtgcatttctacaaaaaggacatgtatacttgacaaaaattgtcactttgttattggccaacctttgttgtacaaattcctcggccattttaatatttaagtgatataaaactatctcgacttatttaactctttagtcgagatatatggacgcagatagctatatgatagccaactacagaaggcaaacgctataaaaaacataattacgacgagcatatttataaatatttttattcagcattacttgatatagtaatattaggcacagtcaaacattcaaccactctcgatacattaactctctcattttctttaacaaattctgcaatatcttcgtaaaaagattcttgaaactttttagaatatctatcgactctagatgaaatagcgttcgtcaacatactatgttttgtatacataaaggcgcccattttaacagtttctagtgacaaaatgctagcgatcctaggatcctttagaatcacatagattgacgattcgtctctcttagtaactctagtaaaataatcatacaatctagtacgcgaaataatattatccttgacttgaggagatctaaacaatctagttttgagaacatcgataagttcatcgggaatgacatacatactatctttaatagaactcttttcatccagttgaatggattcgtccttaaccaactgattaatgagatcttctattttatcattttccagatgatatgtatgtccattaaagttaaattgtgtagcgcttctttttagtctagcagccaatactttaacatcactaatatcgatatacaaaggagatgatttatctatggcattaagaattcgtttttcgacatccgtcaaaaccaattcctttttgcctgtatcatccagttttccatcctttgtaaagaaattattttctactagactattaataagactgataaggattcctccataattgcacaatccaaactttttaacaaaactagactttacgagatctacaggaatgcgtacttcaggttttttagcttgtgattttttcttttgcggacattttctagtaaccaactcatctaccatttcattgattttagcagtgaaataagctttcaatgcacgggcactgatactattgaaaacgagttgatcttcaaattccgccatttaagttcaccaaacaacttttaaatacaaatatatcaatagtagtagaataagaactataaaaaaaataataattaaccaaccccaacaaccggtattattagttgatgtggtagttttctcatcacttagaacagatttaacaatttctataaagtctgtcaaatcatcttccggagaccccataaatacaccaaatatagcggcgtacaacttatccatttatacattgaatattggcttttctttatcgctatcttcatcatattcatcatcaatatcaacaagtcccagattacgagccagatcttcttctacattttcagtcattgatacacgttcactatctccagagagtccgataacgttagccaccacttctctatcaatgattagtttcttgagcgcgaaagtaatttttgtttccgttccggatctatagaagacgataggtgtgataattgccttggccaattgtctttctcttttactgagtgattctagttcaccttctatagatctgagaatggatgattctccagtcgaaacatattctaccatggatccgtttaatttgttgatgaagatggattcatccttaaatgttttctctgtaatagtttccaccgaaagactatgcaaagaatttggaatgcgttccttgtgcttaatgtttccatagacggcttctagaagttgatacaacataggactagccgcggtaacttttatttttagaaagtatccatcgcttctatcttgtttagatttatttttataaagtttagtctctccttccaacataataaaagtggaagtcatttgactagataaactatcagtaagttttatagagatagacgaacaattagcgtattgagaagcatttagtgtaacgtattcgatacattttgcattagatttactaatcgattttgcatactctataacacccgcacaagtctgtagagaatcgctagatgcagtaggtcttggtgaagtttcaactctcttcttgattaccttactcatgattaaacctaaataattgtactttgtaatataatgatatatattttcactttatctcatttgagaataaaaatgtttttgtttaaccactgcatgatgtacagatttcggaatcgcaaaccaccagtggttttattttatccttgtccaatgtgaattgaatgggagcggatgcgggtttcgtacgtagatagtacattcccgtttttagaccgagactccatccgtaaaaatgcatactcgttagtttggaataactcggatctgctatatggatattcatagattgactttgatcgatgaaggctcccctgtctgcagccatttttatgatcgtcttttgtggaatttcccaaatagttttataaactcgcttaatatcttctggaaggtttgtattctgaatggatccaccatctgccataatcctattcttgatctcatcattccataattttctctcggttaaaactctaaggagatgcggattaactacttgaaattctccagacaatactctccgagtgtaaatattactggtatacggttccaccgactcattatttcccaaaatttgagcagttgatgcagtcggcataggtgccaccaataaactatttctaagaccgtatgttctgattttatcttttagaggttcccaattccaaagatccgacggtacaacattccaaagatcatattgtagaataccgttactggcgtacgatcctacatatgtatcgtatggtccttccttctcagctagttcacaactcgcctctaatgcaccgtaataaatggtttcgaagatcttcttatttagatcttgtgcttccaggctatcaaatggataatttaagagaataaacgcgtccgctaatccttgaacaccaataccgataggtctatgtctcttattagagatttcagcttctggaataggataataattaatatctataattttattgagatttctgacaattactttgaccacatccttcagtttgagaaaatcaaatcgcccatctattacaaacatgttcaaggcaacagatgccagattacaaacggctacctcattagcatccgcatattgtattatctcagtgcaaagattactacacttgatagttcctaaattttgttgattactctttttgttacacgcatccttataaagaatgaatggagtaccagtttcaatctgagattctataatcgctttccagacgactcgagcctttattatagatttgtatctcctttctctttcgtatagtgtatacaatcgttcgaactcgtctccccaaacattgtccaatccaggacattcatccggacacatcaacgaccactctccgtcatccttcactcgtttcataaagagatcaggaatccaaagagctataaatagatctctggttctatgttcctcgtttcctgtattctttttaagatcgaggaacgccataatatcagaatgccacggttccaagtatatggccataactccaggccgtttgtttcctccctgatctatgtatctagcggtgttattataaactctcaacattggaataataccgtttgatataccattggtaccggagatatagcttccactggcacgaatattactaattgatagacctattccccctgccattttagagattaatgcgcatcgttttaacgtgtcatagataccctctatgctatcatcgatcatgttaagtagaaaacagctagacatttggtgacgactagttcccgcattaaataaggtaggagaagcgtgcgtaaaccatttttcagaaagtagattgtacgtctcaatagctgagtctatatcccattgatgaattcctactgcgacacgcattaacatgtgctgaggtctttcaacgatcttgttgtttattttcaacaagtaggatttttccaaagttttaaaaccaaaatagttgtatgaaaagtctcgttcgtaaataataaccgagttgagtttatccttatatttgttaactatatccatggtgatacttgaaataatcggagaatgtttcccatttttaggattaacatagttgaataaatcctccatcacttcactaaatagtttttttgtttccttgtgtagatttgatacggctattctggcggctagaatggcataatccggatgttgtgtagtacaagtggctgctatttcggctgccagagtgtccaattctaccgttgttactccattatatattccttgaataaccttcatagctattttaataggatctatatgatccgtgtttaagccataacataattttctaatacgagacgtgattttatcaaacatgacattttccttgtatccatttcgtttaatgacaaacatttttgttggtgtaataaaaaaattatttaacttttcattaatagggatttgacgtatgtagcgtacaaaatgattgttcctggtatatagataaagagtcctatatatttgaaaatcgttacggctcgattaaactttaatgattgcatagtgaatatatcattaggatttaactccttgactatcatggcggcgccagaaattaccatcaaaagcattaatacagttataccgatcgcagttagaacggttatagcatccaccatttatatctaaaaattagatcaaagaatatgtgacaaagtcctagttgtatactgagaattgacgaaacaatgtttcttacatatttttttcttattagtaaccgacttaatagtaggaactggaaaactagacttgattattctataagtatagatacccttccaaataatattctctttgataaaagttccagaaaatgtagaattttttaaaaagttatcttttgctattaccaagattgtgtttagacgcttattattaatatgagtgatgaaatccacaccgcctctagatatcgcctttatttccacattagatggtaaatccaatagtgaaactatctttttaggaatgtatggactcgcgtttagaggagtaaacgtcttaggcgtcggaaaggatgattcatcaaacgaataaacaatttcacaaatggatgttaatgtattagtaggaaattttttgacgctattggaattgaagattctaatggatgatgttctacctatttcatccgataacatgttaatttccgacaccaacggttttaatatttcgatgatatacggtagtctctctttcggacttatatagcttattccacaatacgagtcattatatactccaaaaaacaaaataactagtataaaatctgtatcgaatgggaaaaacgaaattatcgacataggtatagaatccggaacattgaacgtattaatacttaattctttttctgtggtaagtaccgataggttattgacattgtatggttttaaatattctataacttgagacttgatagatattagtgatgaattgaaaattatttttatcaccacgtgtgtttcaggatcatcgtcgacgcccgtcaaccaaccgaacggagtaaaataaatatcattaatatatgctctagatattagtatttttatcaatcctttgattatcatcttctcgtaggcgaatgattccatgatcaagagtgatttaagaacatcctccggagtattaatgggcttagtaaacagtccatcgttgcaataataaaagttatccaagttaaaggatattatgcattcgtttaaagatatcacctcatctgacggagacaattttttggtaggttttagagactttgaagctacttgtttaacaaagttattcatcgtcgtctactattctatttaattttgtagttaatttatcacatatcacattaattgactttttggtccacttttccatacgtttatattcttttaatcctgcgttatccgtttccgttatatccagggatagatcttgcaagttaaatagaatgctcttaaataatgtcattttcttatccgctaaaaatttaaagaatgtataaacctttttcagagatttgaaactcttaggtggtgtcctagtacacaatatcataaacaaactaataaacattccacattcagattccaacagctgattaacttccacattaatacagcctattttcgctccaaatgtacattcgaaaaatctgaataaaacatcgatgtcacaatttgtattatccaatacagaatgtttgtgattcgtgttaaaaccatcggagaaggaatagaaataaaaattattatagtggtggaattcagttggaatattgcctccggagtcataaaaggatactaaacattgttttttatcataaattacacatttccaatgagacaaataacaaaatccaaacattacaaatctagaggtagaacttttaattttgtctttaagtatatacgataagatatgtttattcataaacgcgtcaaatttttcatgaatcgctaaggagtttaagaatctcatgtcaaattgtcctatataatccacttcggatccataagcaaactgagagactaagttcttaatacttcgattgctcatccaggctcctctctcaggctctattttcatcttgacgacctttggattttcaccagtatgtattcctttacgtgataaatcatcgattttcaaatccatttgtgagaagtctatcgccttagatactttttcccgtagtcgaggtttaaaaaaatacgctaacggtatactagtaggtaactcaaagacatcatatatagaatggtaacgcgtctttaactcgtcggttaactctttcttttgatcgagttcgtcgctactattgggtctgctcaggtgccccgactctactagttccaacatcataccgataggaatacaagacactttgccggcggttgtagatttatcatatttttccactacatatccgttacaatttgttaaaaatttagatacatctatattgctacataatccagctagtgaatatatatgacataataaattggtaaatcctagttctggtattttactaattactaaatctgtatatctttccatttatcatggaaaagaatttaccagatatcttcttttttccaaactgcgttaatgtattctcttacaaatattcacaagatgaattcagtaatatgagtaaaacggaacgtgatagtttctcattggccgtgtttccagttataaaacatagatggcataacgcacacgttgtaaaacataaaggaatatacaaagttagtacagaagcacgtggaaaaaaagtatctcctccatcactaggaaaacccgcacacataaacctaaccgcgaagcaatatatatacagtgaacacacaataagctttgaatgttatagttttctaaaatgtataacaaatacagaaatcaattcgttcgatgagtatatattaagaggactattagaagctggtaatagtttacagatattttccaattccgtaggtaaacgaacagatactataggtgtactagggaataagtatccatttagcaaaattccattggcctcattaactcctaaagcacaacgagagatattttcagcgtggatttctcatagacctgtagttttaactggaggaactggagtgggtaagacgtcacaggtacccaagttattgctttggtttaattatttatttggtggattctctactctagataaaatcactgactttcacgaaagaccagtcattctatctcttcctaggatagctttagttagattgcatagcaataccattttaaaatcattgggatttaaggtactagatggatctcctatttctttacggtacggatctataccggaagaattaataaacaaacaaccaaaaaaatatggaattgtattttctacccataagttatctctaacaaaactatttagttatggcactcttattatagacgaagttcatgagcatgatcaaataggagatattattatagcagtagcgagaaagcatcatacgaaaatagattctatgtttttaatgactgccacgttagaggatgacagggaacggctaaaagtatttttacctaatcccgcatttatacatattcctggagatacactgtttaaaattagcgaggtatttattcataataagataaatccatcttccagaatggcatacatagaagaagaaaagagaaatttagttactgctatacagatgtatactcctcctgatggatcatccggtatagtctttgtggcatccgttgcacagtgtcacgaatataaatcatatttagaaaaaagattaccgtatgatatgtatattattcatggtaaggtcttagatatagacgaaatattagaaaaagtgtattcatcacctaatgtatcgataattatttctactccttatttggaatccagcgttactatacgcaatgttacacacatttatgatatgggtagagtttttgtccccgctccttttggaggatcgcaacaatttatttctaaatctatgagagatcaacgaaaaggaagagtaggaagagttaatcctggtacatacgtctatttctatgatctgtcttatatgaagtctatacagcgaatagattcagaatttctacataattatatattgtacgctaataagtttaatctaacactccccgaagatttgtttataatccctacaaatttggatattctatggcgtacaaaggaatatatagactcgttcgatattagtacagaaacatggaataaattattatccaattattatatgaagatgatagagtatgctaaactttatgtactaagtcctattctcgctgaggagttggataactttgagaggacgggagaattaactagtattgtacgagaagccattttatctctaaatttacaaattaagattttaaattttaaacataaagatgatgatacgtatatacacttttgtaaaatattattcggtgtctataacggaacaaacgctactatatattatcatagacctctaacgggatatatgaatatgatttcagatactatatttgttcctgtagataataactaaaaatcaaactctaatgaccacatctttttttagagatgaaaaattttccacatctccttttgtagacacgactaaacattttgcagaaaaaagtttattagtgtttagataatcgtatacttcatcagtgtagatagtaaatgtgaacagataaaaggtattcttgctcaatagattggtaaattccatagaatatattaatcctttcttcttgagatcccacatcatttcaaccagagacgttttatccaatgatttacctcgtactataccacatacaaaactagattttgcagtgacgtcgtacctggtattcctaccaaacaaaattttacttttagttcttttagaaaattctaaggtagaatctctatttgccaatatgtcatctatggaattaccactagcaaaaaatgatagaaatatatattgatacatcgcagctggttttgatctactatactttaaaaacgaatcagattccataattgcctgtatatcatcagctgaaaaactatgttttacacgtattccttcggcatttctttttaatgatatatcttgtttagacaatgataaagttatcatgtccatgagagacgcgtctccgtatcgtataaatatttcattagatgttagacgcttcattaggggtatacttctataaggtttcttaatcagtccatcattggttgcgtcaagaactactatcggatgttgttgggtatctctagtgttacacatggccttactaaagtttgggtaaataactatgatatctctattaattatagatgcatatatttcattcgtcaaggatattagtatcgacttgctatcgtcattaatacgtgtaatgtaatcatataaatcatgcgatagccaaggaaaatttaaatagatgttcatcatataatcgtcgctataattcatattaatacgttgacattgactaatttgtaatatagcctcgccacgaagaaagctctcgtattcagtttcatcgataaaggataccgttaaatataactggttgccgatagtctcatagtctattaagtggtaagtttcgtacaaatacagaatccctaaaatattatctaatgttggattaatctttaccataactgtataaaatggagacggagtcataactattttaccgtttgtacttactggaatagatgaaggaataatctccggacatgctggtaaagacccaaatgtctgtttgaagaaatccaatgttccaggtcctaatctcttaacaaaaattacgatattcgatcccgatatcctttgcattctatttaccagcatatcacgaactatattaagattatctatcatgtctattctcccaccgttatataaatcgcctccgctaagaaacgttagtatatccatacaatggaatacttcatttctaaaatagtattcgttttctaattctttaatgtgaaatcgtatactagaaagggaaaaattatctttgagttttccgttagaaaagaaccacgaaactaatgttctgattgcgtccgattccgttgctgaattaatggatttacaccaaaaactcatataacttctagatgtagaagcattcgctaaaaaattagtagaatcaaaggatataagtagatgttccaacaagtgagcaattcccaagatttcatctatatcattctcgaatccgaaattagaaattcccaagtagatatcctttttcatccgatcgttgatgaaaatacgaactttattcggtaagacaatcatttactaaggagtaaaataggaagtaatgttcgtatgtcgttatcatcgtataaattaaaggtgtgttttttaccattaagtgacattataattttaccaatattggaattataatataggtgtatttgcgcactcgcgacggttgatgcatcggtaaatatagctgtatctaatgttctagtcggtatttcatcatttcgctgtctaataatagcgttttctctatctgtttccattacagctgcctgaagtttattggtcggataatatgtaaaataataagaaatacatacgaataacaaaaataaaataagatataataaagatgccatttagagatctaattttgtttaacttgtccaaattcctacttacagaagatgaggaatcgttggagatagtgtcttccttatgtagaggatttgaaatatcttataatgacttgataacttactttccagataggaaataccataaatatatttataaagtatttgaacatgtagatttatcggaggaattaagtatggaattccatgatacaactctgagagatttagtctatcttagattgtacaagtattccaagtgtatacggccgtgttataaattaggagataatctaaaaggcatagttgttataaaggacaggaatatttatattagggaagcaaatgatgacttgatagaatatctcctcaaggaatacactcctcagatttatacatattctaatgagcgcgtccccataactggttcaaaattaattctttgtggattttctcaagttacatttatggcgtatacaacgtcgcatataacaacaaataaaaaggtagatgttctcgtttccaaaaaatgtatagatgaactagtcgatccaataaattatcaaatacttcaaaatttatttgataaaggaagcggaacaataaacaaaatactcaggaagatattttattcggtaacaggtggccaaactccataggtagctttttctatttcggattttagaatttccaaattcaccagcgatttatcggttttggtgaaatccaaggatttattaatgtccacaaatgccatttgttttgtctgtggattgtatttgaaaatggaaacgatgtagttagatagatgcgctgcgaagtttcctattagggttccgcgcttcacgtcacccagcatacttgaatcaccatcctttaaaaaaaatgataagatatcaacatggagtatatcatactcgaattttaattcttctactgactcactgacattttcacaaatactacaatacggtttaccgaaaataatcagtacgttcttcatttatgggtatcaaaaacttaaaatcgttactgctggaaaataaatcactgacgatattagatgataatttatacaaagtatacaatggaatatttgtggatacaatgagtatttatatagccgtcgccaattgtgtcagaaacttagaagagttaactacggtattcataaaatacgtaaacggatgggtaaaaaagggagggcatgtaaccctttttatcgatagaggaagtataaaaattaaacaagacgttagagacaagagacgtaaatattctaaattaaccaaggacagaaaaatgttagaattagaaaagtgtacatccgaaatacaaaatgttaccggatttatggaagaagaaataaaggcagaaatgcaattaaaaatcgataaactcacatttcaaatatatttatctgattctgataacataaaaatatcattgaatgagatactaacacatttcaacaataatgagaatgttacattattttattgtgatgaacgagacgcagaattcgttatgtgtctcgaggctaaaacacatttctctaccacaggagaatggccgttgataataagtaccgatcaggatactatgctatttgcatctgctgataatcatcctaagatgataaaaaacttaactcaactgtttaaatttgttccctcggcagaggataactatttagcaaaattaacggcgttagtgaatggatgtgatttctttcctggactctatggggcatctataacacccaccaacttaaacaaaatacaattgtttagtgattttacaatcgataatatagtcactagtttggcaattaaaaattattatagaaagactaactctaccgtagacgtgcgtaatattgttacgtttataaacgattacgctaatttagacgatgtctactcgtatattcctccttgtcaatgcactgttcaagaatttatattttccgcattagatgaaaaatggaatgaatttaaatcatcttatttagaaagcgtgccgttaccctgccaattaatgtacgcgttagaaccacgcaaggagattgatgtttcagaagttaaaactttatcatcttatatagatttcgaaaatactaaatcagatatcgatgttataaaatctatatcctcgatcttcggatattctaacgaaaactgtaacacgatagtattcggcatctataaggataatttactactgagtataaataattcattttactttaacgatagtctgttaataaccaatactaaaagtgataatataataaatataggttactagattaaaaatggtgttccaactcgtgtgctctacatgcggtaaagatatttctcacgaacgatataaattgattatacgaaaaaaatcattaaaggatgtactcgtcagtgtaaagaacgaatgttgtaggttaaaattatctacacaaatagaacctcaacgtaacttaacagtgcaacctctattggatataaactaatatggatccggttaattttatcaagacatatgcgcctagaggttctattatttttattaattataccatgtcattaacaagtcatttgaatccatcgatagaaaaacatgtgggtatttattatggtacgttattatcggaacacttggtagttgaatctacctatagaaaaggagttcgaatagtcccattggatagtttttttgaaggatatcttagtgcaaaagtatacatgttagagaatattcaagttatgaaaatagcagctgatacgtcattaactttattgggtattccgtatggatttggtcatgatagaatgtattgttttaaattggtagctgactgttataaaaatgccggtattgatacatcgtctaaacgaatattgggcaaagatatttttctgagccaaaacttcacagacgataatagatggataaagatatatgattctaataatttaacattttggcaaattgattaccttaaagggtgagttaatatgcataactactcctccgttgttttttccctcgttctttttcttaacgttgtttgccatcactctcataatgtaaagatattctaaaatggtaaacttttgcatatcggacgcagaaattggtataaatgttgtaattgtattatttcccgtcaatggactagtcacagctccatcagttttatatcctttagagtatttctcactcgtgtctaacattctagagcattccatgatctgtttatcgttgatattggccggaaagatagattttttattttttattatattactattggcaattgtagatataacttctggtaaatatttttctaccttttcaatctcttctattttcaagccggctatatattctgctatattgttgctagtatcaataccttttctggctaagaagtcatatgtggtattcactatatcagttttaactggtagttccattagcctttccacttctgcagaataatcagaaattggttctttaccagaaaatccagctactataataggctcaccgatgatcattggcaaaatcctatattgtaccagattaatgagagcatatttcatttccaataattctgctagttcttgagacattgatttatttgatgaatctagttggttctctagatactctaccatttctgccgcatacaataacttgttagataaaatcagggttatcaaagtgtttagcgtggctagaatagtgggcttgcatgtattaaagaatgcggtagtatgagtaaaccgttttaacgaattatatagtctccagaaatctgtggcgttacatacatgagccgaatgacatcgaagattgtccaatatttttaatagctgctctttgtccattatttctatatttgactcgcaacaattgtagataccattaatcaccgattcctttttcgatgccggacaatagcacaattgtttagctttggactctatgtattcagaattaatagatatatctctcaatacagattgcactatacattttgaaactatgtcaaaaattgtagaacgacgctgttctgcagccatttaactttaaataatttacaaaaatttaaaatgagcatccgtataaaaatcgataaactgcgccaaattgtggcatatttttcagagttcagtgaagaagtgtctataaatgtagactcgacggatgagttaatgtatatttttgccgccttgggcggatctgtaaacatttgggcaattatacctctaagtgcatcagtgttttaccgaggagccgaaaatattgtgtttaatcttcctgtgtccaaggtaaaatcgtgtttgtgtagttttcacaatgatgccatcatagatatagaacctgatctggaaaataatctagtaaaactttctagttatcatgtagtaagtgtcgattgtaacaaggaactgatgcctattaggacagatactactatttgtctaagtatagatcaaaagaaatcttacgtgtttaattttcacaagtatgaagaaaaatgttgtggtagaaccgtcattcatctagaatggttgttgggctttatcaagtgtattagtcagcatcagcatctggctattatgtttaaagatgacaatattattatgaagactcctggtaatactgatgcgttttccagggaatattctatgactgaatgttctcaagaactacaaaagttttctttcaaaatagctatctcgtctctcaacaaactacgaggattcaaaaagagagtcaatgtttttgaaactagaatcgtaatggataatgacgataacattttaggaatgttgttttcggatagagttcaatcctttaagatcaacatctttatggcgtttttagattaatactttcaatgagataaatatgggtggcggagtaagtgttgagctccctaaacgggatccgcctccgggagtacccactgatgagatgttattaaacgtggataaaatgcatgacgtgatagctcccgctaagcttttagaatatgtgcatataggaccactagcaaaagataaagaggataaagtaaagaaaagatatccagagtttagattagtcaacacaggacccggtggtctttcggcattgttaagacaatcgtataatggaaccgcacccaattgctgtcgcacttttaatcgtactcattattggaagaaggatggaaagatatcagataagtatgaagagggtgcagtattagaatcgtgttggccagacgttcacgacactggaaaatgcgatgttgatttattcgactggtgtcagggggatacgttcgatagaaacatatgccatcagtggatcggttcagcctttaataggagtaatagaactgtagagggtcaacaatcgttaataaatctgtataataagatgcaaacattatgtagtaaagatgctagtgtaccaatatgcgaatcatttttgcattatttacgcgcacacaatacagaagatagcaaagagatgatcgattatattctaagacaacagtctgcggactttaaacagaaatatatgagatgtagttatcccactagagataagttagaagagtcattaaaatatgcggaacctcgagaatgttgggatccagagtgttcgaatgccaatgttaatttcttactaacacgtaattataataatttaggactttgcaatattgtacgatgtaataccagcgtgaacaacttacagatggataaaacttcctcattaagattgtcatgtggattaagcaatagtgatagattttctactgttcccgtcaatagagcaaaagtagttcaacataatattaaacactcgttcgacctaaaattgcatttgatcagtttattatctctcttggtaatatggatactaattgtagctatttaaatgggtgccgcggcaagcatacagacgacggtgaatacactcagcgaacgtatctcgtctaaattagaacaagaagcgaacgctagtgctcaaacaaaatgtgatatagaaatcggaaatttttatatccgacaaaaccatggatgtaacctcactgttaaaaatatgtgctctgcggacgcggatgctcagttggatgctgtgttatcagccgctacagaaacatatagtggattaacaccggaacaaaaagcatacgtgccagctatgtttactgctgcgttaaacattcagacgagtgtaaacactgttgttagagattttgaaaattatgtgaaacagacttgtaattctagcgcggtcgtcgataacaaattaaagatacaaaacgtaatcatagatgaatgttacggagccccaggatctccaacaaatttggaatttattaatacaggatctagcaaaggaaattgtgccattaaagcgttgatgcaattgacgactaaggccactactcaaatagcacctagacaagttgctggtacaggagttcagttttatatgattgttatcggtgttataatattggcagcgttgtttatgtactatgccaagcgtatgttgttcacatccaccaatgataaaatcaaacttattttagccaataaggaaaacgtccattggactacttacatggacacattctttagaacttctccgatggttattgctaccacggatatgcaaaactgaaaatatattgataatattttaatagattaacatggaagttatcgctgatcgtctagacgatatagtgaaacaaaatatagcggatgaaaaatttgtagattttgttatacacggtctagagcatcaatgtcctgctatacttcgaccattaattaggttgtttattgatatactattatttgttatagtaatttatatttttacggtacgtctagtaagtagaaattatcaaatgttgttggtggtgctagtcatcacattaactattttttattactttatactataatagtactagactgacttctaacaaacatctcacctgccataaataaatgcttgatattaaagtcttctatttctaacactattccatctgtggaaaataatactctgacattatcgctaattgacacatcggtgagtgatatgcctataaagtaataatcttctttgggcacatataccagtgtaccaggttctaacaacctatttactggtgctcctgtagcatactttttctttaccttgagaatatccatcgtttgcttggtcaatagcgatatgtgattttttatcaaccactcaaaaaagtaattggagtgttcatatcctctacgggctattgtctcatggccgtgtatgaaatttaagtaacacgactgtggtagatttgttctatagagccgattgccgcaaatagatagaactaccaatatgtctgtacaaatgttaaacattaattgattaacagaaaaaacaatgttcgttctgggaatagaaaccagatcaaaacaaaattcgttagaatatatgccacgtttatacatggaatataaaataactacagtttgaaaaataacagtatcatttaaacatttaacttgcggggttaatctcacaactttactgtttttgaactgttcaaaatatagcatcgatccgtgagaaatacgtttagccgcctttaatagaggaaatcccaccgcctttctggatctcaccaacgacgatagttctgaccagcaactcatttcttcatcatccacctgttttaacatataataggcaggagatagatatccgtcattgcaatattccttctcgtaggcacacaatctaatattgataaaatctccattctcttctctgcatttattatcttgtctcggtggctgattaggctgtggtcttggtttaggccttggtctatcgttgttgaatctattttggtcattaaatctttcatttcttcctggtatatttctatcacctcgtttggttggatttttgtctatattatcgtttgtaacatcggtacgggtattcatttatcacaaaaaaaacttctctaaatgagtctactgctagaaaacctcatcgaagaagataccatattttttgcaggaagtatatctgagtatgatgatttacaaatggttattgccggcgcaaaatccaaatttccaagatctatgctttctatttttaatatagtacctagaacgatgtcaaaatatgagttggagttgattcataacgaaaatatcacaggagcaatgtttaccacaatgtataatataagaaacaatttgggtctaggagatgataaactaactattgaagccattgaaaactatttcttggatcctaacaatgaagttatgcctcttattattaataatacggatatgactgccgtcattcctaaaaaaagtggtaggagaaagaataagaacatggttatcttccgtcaaggatcatcacctatcttgtgcattttcgaaactcgtaaaaagattaatatttataaagaaaatatggaatccgcgtcgactgagtatacacctatcggagacaacaaggctttgatatctaaatatgcgggaattaatgtcctgaatgtgtattctccttccacatccataagattgaatgccatttacggattcaccaataaaaataaactagagaaacttagtactaataaggaactagaatcgtatagttctagccctcttcaagaacccattaggttaaatgattttctgggactattggaatgtgttaaaaagaatattcctctaacagatattccgacaaaggattgattactataaatggagaatgttcctaatgtatactttaatcctgtgtttatagagcccacgtttaaacattctttattaagtgtttataaacacagattaatagttttatttgaagtattcgttgtattcattctaatatatgtattttttagatctgaattaaatatgttcttcatgcctaaacgaaaaatacccgatcctattgatagattacgacgtgctaatctagcgtgtgaagacgataaattaatgatctatggattaccatggatgacaactcaaacatctgcgttatcaataaatagtaaaccgatagtgtataaagattgtgcaaagcttttgcgatcaataaatggatcacaaccagtatctcttaacgatgttcttcgcagatgatgattcattttttaagtatttggctagtcaagatgatgaatcttcattatctgatatattgcaaatcactcaatatctagactttctgttattattattgatccaatcaaaaaataaattagaagctgtgggtcattgttatgaatctctttcagaggaatacagacaattgacaaaattcacagactttcaagattttaaaaaactgtttaacaaggtccctattgttacagatggaagggtcaaacttaataaaggatatttgttcgactttgtgattagtttgatgcgattcaaaaaagaatcctctctagctaccaccgcaatagatcctgttagatacatagatcctcgtcgcaatatcgcattttctaacgtgatggatatattaaagtcgaataaagtgaacaataattaattctttattgtcatcatgaacggcggacatattcagttgataatcggccccatgttttcaggtaaaagtacagaattaattagacgagttagacgttatcaaatagctcaatataaatgcgtgactataaaatattctaacgataatagatacggaacgggactatggacgcatgataagaataattttgaagcattggaagcaactaaactatgtgatgtcttggaatcaattacagatttctccgtgataggtatcgatgaaggacagttctttccagacattgttgaattagatcgataaaaattaattaattacccgggtaccaggcctagatctgtcgagatccggtggtggtgcaaatcaaagaactgctcctcagtggatgttgcctttacttctaggcctgtacggaagtgttacttctgctctaaaagctgctgcagggggggggggggggtgggggggccggttagggccgccatcccctcagagcgtcgggatatcgggtggcggctcgggacggaggacgcgctagtgttcttctgtgtggcagttcagaatgatggatcaagctagatcagcattctctaacttgtttggtggagaaccattgtcatatacccggttcagcctggctcggcaagtagatggcgataacagtcatgtggagatgaaacttgctgtagatgaagaagaaaatgctgacaataacacaaaggccaatgtcacaaaaccaaaaaggtgtagtggaagtatctgctatgggactattgctgtgatcgtctttttcttgattggatttatgattggctacttgggctattgtaaaggggtagaaccaaaaactgagtgtgagagactggcaggaaccgagtctccagtgagggaggagccaggagaggacttccctgcagcacgtcgcttatattgggatgacctgaagagaaagttgtcggagaaactggacagcacagacttcaccagcaccatcaagctgctgaatgaaaattcatatgtccctcgtgaggctggatctcaaaaagatgaaaatcttgcgttgtatgttgaaaatcaatttcgtgaatttaaactcagcaaagtctggcgtgatcaacattttgttaagattcaggtcaaagacagcgctcaaaactcggtgatcatagttgataagaacggtagacttgtttacctggtggagaatcctgggggttatgtggcgtatagtaaggctgcaacagttactggtaaactggtccatgctaattttggtactaaaaaagattttgaggatttatacactcctgtgaatggatctatagtgattgtcagagcagggaaaatcacctttgcagaaaaggttgcaaatgctgaaagcttaaatgcaattggtgtgttgatatacatggaccagactaaatttcccattgttaacgcagaactttcattctttggacatgctcatctggggacaggtgacccttacacacctggattcccttccttcaatcacactcagtttccaccatctcggtcatcaggattgcctaatatacctgtccagacaatctccagagctgctgcagaaaagctgtttgggaatatggaaggagactgtccctctgactggaaaacagactctacatgtaggatggtaacctcagaaagcaagaatgtgaagctcactgtgagcaatgtgctgaaagagataaaaattcttaacatctttggagttattaaaggctttgtagaaccagatcactatgttgtagttggggcccagagagatgcatggggccctggagctgcaaaatccggtgtaggcacagctctcctattgaaacttgcccagatgttctcagatatggtcttaaaagatgggtttcagcccagcagaagcattatctttgccagttggagtgctggagactttggatcggttggtgccactgaatggctagagggatacctttcgtccctgcatttaaaggctttcacttatattaatctggataaagcggttcttggtaccagcaacttcaaggtttctgccagcccactgttgtatacgcttattgagaaaacaatgcaaaatgtgaagcatccggttactgggcaatttctatatcaggacagcaactgggccagcaaagttgagaaactcactttagacaatgctgctttccctttccttgcatattctggaatcccagcagtttctttctgtttttgcgaggacacagattatccttatttgggtaccaccatggacacctataaggaactgattgagaggattcctgagttgaacaaagtggcacgagcagctgcagaggtcgctggtcagttcgtgattaaactaacccatgatgttgaattgaacctggactatgagaggtacaacagccaactgctttcatttgtgagggatctgaaccaatacagagcagacataaaggaaatgggcctgagtttacagtggctgtattctgctcgtggagacttcttccgtgctacttccagactaacaacagatttcgggaatgctgagaaaacagacagatttgtcatgaagaaactcaatgatcgtgtcatgagagtggagtatcacttcctctctccctacgtatctccaaaagagtctcctttccgacatgtcttctggggctccggctctcacacgctgccagctttactggagaacttgaaactgcgtaaacaaaataacggtgcttttaatgaaacgctgttcagaaaccagttggctctagctacttggactattcagggagctgcaaatgccctctctggtgacgtttgggacattgacaatgagttttaaatgtgatacccatagcttccatgagaacagcagggtagtctggtttctagacttgtgctgatcgtgctaaattttcagtagggctacaaaacctgatgttaaaattccatcccatcatcttggtactactagatgtctttaggcagcagcttttaatacagggtagataacctgtacttcaagttaaagtgaataaccacttaaaaaatgtccatgatggaatattcccctatctctagaattttaagtgctttgtaatgggaactgcctctttcctgttgttgttaatgaaaatgtcagaaaccagttatgtgaatgatctctctgaatcctaagggctggtctctgctgaaggttgtaagtggtcgcttactttgagtgatcctccaacttcatttgatgctaaataggagataccaggttgaaagaccttctccaaatgagatctaagcctttccataaggaatgtagctggtttcctcattcctgaaagaaacagttaactttcagaagagatgggcttgttttcttgccaatgaggtctgaaatggaggtccttctgctggataaaatgaggttcaactgttgattgcaggaataaggccttaatatgttaacctcagtgtcatttatgaaaagaggggaccagaagccaaagacttagtatattttcttttcctctgtcccttcccccataagcctccatttagttctttgttatttttgtttcttccaaagcacattgaaagagaaccagtttcaggtgtttagttgcagactcagtttgtcagactttaaagaataatatgctgccaaattttggccaaagtgttaatcttaggggagagctttctgtccttttggcactgagatatttattgtttatttatcagtgacagagttcactataaatggtgtttttttaatagaatataattatcggaagcagtgccttccataattatgacagttatactgtcggttttttttaaataaaagcagcatctgctaataaaacccaacagatactggaagttttgcatttatggtcaacacttaagggttttagaaaacagccgtcagccaaatgtaattgaataaagttgaagctaagatttagagatgaattaaatttaattaggggttgctaagaagcgagcactgaccagataagaatgctggttttcctaaatgcagtgaattgtgaccaagttataaatcaatgtcacttaaaggctgtggtagtactcctgcaaaattttatagctcagtttatccaaggtgtaactctaattcccattttgcaaaatttccagtacctttgtcacaatcctaacacattatcgggagcagtatcttccataatgtataaagaacaaggtagtttttacctaccacagtgtctgtatcggagacagtgatctccatatgttacactaagggtgtaagtaattatcgggaacagtgtttcccataattttcttcatgcaatgacatcttcaaagcttgaagatcgttagtatctaacatgtatcccaactcctataattccctatcttttagttttagttgcagaaacattttgtggtcattaagcattgggtgggtaaattcaaccactgtaaaatgaaattactacaaaatttgaaatttagcttgggtttttgttacctttatggtttctccaggtcctctacttaatgagatagtagcatacatttataatgtttgctattgacaagtcattttaactttatcacattatttgcatgttacctcctataaacttagtgcggacaagttttaatccagaattgaccttttgacttaaagcagagggactttgtatagaaggtttgggggctgtggggaaggagagtcccctgaaggtctgacacgtctgcctacccattcgtggtgatcaattaaatgtaggtatgaataagttcgaagctccgtgagtgaaccatcattataaacgtgatgatcagctgtttgtcatagggcagttggaaacggcctcctagggaaaagttcatagggtctcttcaggttcttagtgtcacttacctagatttacagcctcacttgaatgtgtcactactcacagtctctttaatcttcagttttatctttaatctcctcttttatcttggactgacatttagcgtagctaagtgaaaaggtcatagctgagattcctggttcgggtgttacgcacacgtacttaaatgaaagcatgtggcatgttcatcgtataacacaatatgaatacagggcatgcattttgcagcagtgagtctcttcagaaaacccttttctacagttagggttgagttacttcctatcaagccagtacgtgctaacaggctcaatattcctgaatgaaatatcagactagtgacaagctcctggtcttgagatgtcttctcgttaaggagatgggccttttggaggtaaaggataaaatgaatgagttctgtcatgattcactattctagaacttgcatgacctttactgtgttagctctttgaatgttcttgaaattttagactttctttgtaaacaaatgatatgtccttatcattgtataaaagctgttatgtgcaacagtgtggagattccttgtctgatttaataaaatacttaaacactgaaaaaaaaaaaaaaaaaaaaaaaaaaaaaaaaaaaaaaaaaaaaaaaaaaaaaaaaaaaaaaaaaaaaaaaaaaaaaaaaagtaccttctgaggcggaaagaaccagccggatctcgacttcgagcttatttatattccaaaaaaaaaaaataaaatttcaatttttaagctttcactaattccaaacccacccgctttttatagtaagtttttcacccataaataataaatacaataattaatttctcgtaaaagtagaaaatatattctaatttattgcacggtaaggaagtagatcataactcgagcatgggagatcccgtcgttttacaacgtcgtgactgggaaaaccctggcgttacccaacttaatcgccttgcagcacatccccctttcgccagctggcgtaatagcgaagaggcccgcaccgatcgcccttcccaacagttgcgcagcctgaatggcgaatggcgctttgcctggtttccggcaccagaagcggtgccggaaagctggctggagtgcgatcttcctgaggccgatactgtcgtcgtcccctcaaactggcagatgcacggttacgatgcgcccatctacaccaacgtgacctatcccattacggtcaatccgccgtttgttcccacggagaatccgacgggttgttactcgctcacatttaatgttgatgaaagctggctacaggaaggccagacgcgaattatttttgatggcgttaactcggcgtttcatctgtggtgcaacgggcgctgggtcggttacggccaggacagtcgtttgccgtctgaatttgacctgagcgcatttttacgcgccggagaaaaccgcctcgcggtgatggtgctgcgctggagtgacggcagttatctggaagatcaggatatgtggcggatgagcggcattttccgtgacgtctcgttgctgcataaaccgactacacaaatcagcgatttccatgttgccactcgctttaatgatgatttcagccgcgctgtactggaggctgaagttcagatgtgcggcgagttgcgtgactacctacgggtaacagtttctttatggcagggtgaaacgcaggtcgccagcggcaccgcgcctttcggcggtgaaattatcgatgagcgtggtggttatgccgatcgcgtcacactacgtctgaacgtcgaaaacccgaaactgtggagcgccgaaatcccgaatctctatcgtgcggtggttgaactgcacaccgccgacggcacgctgattgaagcagaagcctgcgatgtcggtttccgcgaggtgcggattgaaaatggtctgctgctgctgaacggcaagccgttgctgattcgaggcgttaaccgtcacgagcatcatcctctgcatggtcaggtcatggatgagcagacgatggtgcaggatatcctgctgatgaagcagaacaactttaacgccgtgcgctgttcgcattatccgaaccatccgctgtggtacacgctgtgcgaccgctacggcctgtatgtggtggatgaagccaatattgaaacccacggcatggtgccaatgaatcgtctgaccgatgatccgcgctggctaccggcgatgagcgaacgcgtaacgcgaatggtgcagcgcgatcgtaatcacccgagtgtgatcatctggtcgctggggaatgaatcaggccacggcgctaatcacgacgcgctgtatcgctggatcaaatctgtcgatccttcccgcccggtgcagtatgaaggcggcggagccgacaccacggccaccgatattatttgcccgatgtacgcgcgcgtggatgaagaccagcccttcccggctgtgccgaaatggtccatcaaaaaatggctttcgctacctggagagacgcgcccgctgatcctttgcgaatacgcccacgcgatgggtaacagtcttggcggtttcgctaaatactggcaggcgtttcgtcagtatccccgtttacagggcggcttcgtctgggactgggtggatcagtcgctgattaaatatgatgaaaacggcaacccgtggtcggcttacggcggtgattttggcgatacgccgaacgatcgccagttctgtatgaacggtctggtctttgccgaccgcacgccgcatccagcgctgacggaagcaaaacaccagcagcagtttttccagttccgtttatccgggcaaaccatcgaagtgaccagcgaatacctgttccgtcatagcgataacgagctcctgcactggatggtggcgctggatggtaagccgctggcaagcggtgaagtgcctctggatgtcgctccacaaggtaaacagttgattgaactgcctgaactaccgcagccggagagcgccgggcaactctggctcacagtacgcgtagtgcaaccgaacgcgaccgcatggtcagaagccgggcacatcagcgcctggcagcagtggcgtctggcggaaaacctcagtgtgacgctccccgccgcgtcccacgccatcccgcatctgaccaccagcgaaatggatttttgcatcgagctgggtaataagcgttggcaatttaaccgccagtcaggctttctttcacagatgtggattggcgataaaaaacaactgctgacgccgctgcgcgatcagttcacccgtgcaccgctggataacgacattggcgtaagtgaagcgacccgcattgaccctaacgcctgggtcgaacgctggaaggcggcgggccattaccaggccgaagcagcgttgttgcagtgcacggcagatacacttgctgatgcggtgctgattacgaccgctcacgcgtggcagcatcaggggaaaaccttatttatcagccggaaaacctaccggattgatggtagtggtcaaatggcgattaccgttgatgttgaagtggcgagcgatacaccgcatccggcgcggattggcctgaactgccagctggcgcaggtagcagagcgggtaaactggctcggattagggccgcaagaaaactatcccgaccgccttactgccgcctgttttgaccgctgggatctgccattgtcagacatgtataccccgtacgtcttcccgagcgaaaacggtctgcgctgcgggacgcgcgaattgaattatggcccacaccagtggcgcggcgacttccagttcaacatcagccgctacagtcaacagcaactgatggaaaccagccatcgccatctgctgcacgcggaagaaggcacatggctgaatatcgacggtttccatatggggattggtggcgacgactcctggagcccgtcagtatcggcggaattccagctgagcgccggtcgctaccattaccagttggtctggtgtcaaaaataataataaccgggcaggggggatccaattctgtgagcgtatggcaaacgaaggaaaaatagttatagtagccgcactcgatgggacatttcaacgtaaaccgtttaataatattttgaatcttattccattatctgaaatggtggtaaaactaactgctgtgtgtatgaaatgctttaaggaggcttccttttctaaacgattgggtgaggaaaccgagatagaaataataggaggtaatgatatgtatcaatcggtgtgtagaaagtgttacatcgactcataatattatattttttatctaaaaaactaaaaataaacattgattaaattttaatataatacttaaaaatggatgttgtgtcgttagataaaccgtttatgtattttgaggaaattgataatgagttagattacgaaccagaaagtgcaaatgaggtcgcaaaaaaactgccgtatcaaggacagttaaaactattactaggagaattattttttcttagtaagttacagcgacacggtatattagatggtgccaccgtagtgtatataggatctgctcccggtacacatatacgttatttgagagatcatttctataatttaggagtgatcatcaaatggatgctaattgacggccgccatcatgatcctattttaaatggattgcgtgatgtgactctagtgactcggttcgttgatgaggaatatctacgatccatcaaaaaacaactgcatccttctaagattattttaatttctgatgtgagatccaaacgaggaggaaatgaacctagtacggcggatttactaagtaattacgctctacaaaatgtcatgattagtattttaaaccccgtggcgtctagtcttaaatggagatgcccgtttccagatcaatggatcaaggacttttatatcccacacggtaataaaatgttacaaccttttgctccttcatattcagctgaaatgagattattaagtatttataccggtgagaacatgagactgactcgagttaccaaattagacgctgtaaattatgaaaaaaagatgtactaccttaataagatcgtccgtaacaaagtagttgttaactttgattatcctaatcaggaatatgactattttcacatgtactttatgctgaggaccgtgtactgcaataaaacatttcctactactaaagcaaaggtactatttctacaacaatctatatttcgtttcttaaatattccaacaacatcaactgaaaaagttagtcatgaaccaatacaacgtaaaatatctagcaaaaattctatgtctaaaaacagaaatagcaagagatccgtacgcggtaataaatagaaacgtactactgagatatactaccgatatagagtataatgatttagttactttaataaccgttagacataaaattgattctatgaaaactgtgtttcaggtatttaacgaatcatccataaattatactccggttgatgatgattatggagaaccaatcattataacatcgtatcttcaaaaaggtcataacaagtttcctgtaaattttctatacatagatgtggtaatatctgacttatttcctagctttgttagactagatactacagaaactaatatagttaatagtgtactacaaacaggcgatggtaaaaagactcttcgtcttcccaaaatgttagagacggaaatagttgtcaagattctctatcgccctaatataccattaaaaattgttagatttttccgcaataacatggtaactggagtagagatagccgatagatctgttatttcagtcgctgattaatcaattagtagagatgagataagaacattataataatcaataatatatcttatatcttatatcttatatcttatatcttgtttagaaaaatgctaatattaaaatagctaacgctagtaatccaatcggaagccatttgatatctataatagggtatctaatttcctgatttaaatagcggacagctatattctcggtagctactcgtttggaatcacaaacattatttacatctaatttactatctgtaatggaaacgtttcccaatgaaatggtacaatccgatacattgcattttgttatatttttttttaaagaggctggtaacaacgcatcgcttcgtttacatggctcgtaccaacaataatagggtaatcttgtatctattcctatccgtactatgcttttatcaggataaatacatttacatcgtatatcgtctttgttagcatcacagaatgcataaatttgttcgtccgtcatgataaaaatttaaagtgtaaatataactattatttttatagttgtaataaaaagggaaatttgattgtatactttcggttctttaaaagaaactgacttgataaaaatggctgtaatctctaaggttacgtatagtctatatgatcaaaaagagattaatgctacagatattatcattagtcatgttaaaaatgacgacgatatcggtaccgttaaagatggtagactaggtgctatggatggggcattatgtaagacttgtgggaaaacggaattggaatgtttcggtcactggggtaaagtaagtatttataaaactcatatagttaagcctgaatttatttcagaaattattcgtttactgaatcatatatgtattcactgcggattattgcgttcacgagaaccgtattccgacgatattaacctaaaagagttatcgggacacgctcttaggagattaaaggataaaatattatccaagaaaaagtcatgttggaacagtgaatgtatgcaaccgtatcaaaaaattactttttcaaagaaaaaggtttgtttcgtcaacaagttggatgatattaacgttcctaattctctcatctatcaaaagttaatttctattcatgaaaagttttggccattattagaaattcatcaatatccagctaacttattttatacagactactttcccatccctccgttgattattagaccggctattagtttttggatagatagtatacccaaagagaccaatgaattaacttacttattaggtatgatcgttaagaattgtaacttgaatgctgatgaacaggttatccagaaggcggtaatagaatacgatgatattaaaattatttctaataacactaccagtatcaatttatcatatattacatccggcaaaaataatatgattagaagttatatcgtcgcccgacgaaaagatcagaccgctagatctgtaattggtcccagtacatctatcaccgttaatgaggtaggaatgcccgcatatattagaaatacacttacagaaaagatatttgttaatgcctttacagtggataaagttaaacaactattagcgtcaaaccaagttaaattttactttaataaacgattaaaccaattaacaagaatacgccaaggaaagtttattaaaaataaaatacatttattgcctggtgattgggtagaagtagctgttcaagaatatacaagtattatttttggaagacagccgtctctacatagatacaacgtcatcgcttcatctatcagagctaccgaaggagatactatcaaaatatctcccggaattgccaactctcaaaatgctgatttcgacggggatgaggaatggatgatattagaacaaaatcctaaagctgtaattgaacaaagtattcttatgtatccgacgacgttactcaaacacgatattcatggagcccccgtttatggatctattcaagatgaaatcgtagcagcgtattcattgtttaggatacaagatctttgtttagatgaagtattgaacatcttggggaaatatggaagagagttcgatcctaaaggtaaatgtaaattcagcggtaaagatatctatacttacttgataggtgaaaagattaattatccgggtctcttaaaggatggtgaaattattgcaaacgacgtagatagtaattttgttgtggctatgaggcatctgtcattggctggactcttatccgatcataagtcgaacgtggaaggtatcaactttattatcaagtcatcttatgtttttaagagatatctatctatttacggttttggggtgacattcaaagatctgagaccaaattcgacgttcactaataaattggaggccatcaacgtagaaaaaatagaacttatcaaagaagcatacgccaaatatctcaacgatgtaagagacgggaaaatagttccattatctaaagctttagaggcggactatgtggaatccatgttatccaacttgacaaatcttaatatccgagagatagaagaacatatgagacaaacgctgatagatgatccagataataacctcctgaaaatggccaaagcgggttataaagtaaatcccacagaactaatgtatattctaggtacgtatggacaacaaaggattgatggtgaaccagcagagactcgagtattgggtagagttttaccttactatcttccagactctaaggatccagaaggaagaggttacattcttaattctttaacaaaaggattaacgggttctcaatattacttttcgatgctggttgccagatctcaatctactgatatcgtctgtgaaacatcacgtaccggaacactggctagaaaaatcattaaaaagatggaggatatggtggtcgacggatacggacaagtagttataggtaatacgctcatcaagtacgccgccaattataccaaaattctaggctcagtatgtaaacctgtagatcttatctatccagatgagtccatgacttggtatttggaaattagtgctctgtggaataaaataaaacagggattcgtttactctcagaaacagaaacttgcaaagaagacattggcgccgtttaatttcctagtattcgtcaaacccaccactgaggataatgctattaaggttaaggatctgtacgatatgattcataacgtcattgatgatgtgagagagaaatacttctttacggtatctaatatagattttatggagtatatattcttgacgcatcttaatccttctagaattagaattacaaaagaaacggctatcactatctttgaaaagttctatgaaaaactcaattatactctaggtggtggaactcctattggaattatttctgcacaggtattgtctgagaagtttacacaacaagccctgtccagttttcacactactgaaaaaagtggtgccgtcaaacaaaaacttggtttcaacgagtttaataacttgactaatttgagtaagaataagaccgaaattatcactctggtatccgatgatatctctaaacttcaatctgttaagattaatttcgaatttgtatgtttgggagaattaaatccaaacatcactcttcgaaaagaaacagataaatatgtagtagatataatagtcaatagattatacatcaagagagcagaaataaccgaattagtcgtcgaatatatgattgaacgatttatctcctttagcgtcattgtaaaggaatggggtatggagacattcattgaggacgaggataatattagatttactgtctacctaaatttcgttgaaccggaagaattgaatcttagtaagtttatgatggttcttccgggggcagccaacaagggaaagattagtaaattcaagattcctatctctgattatacgggatatgacgacttcaatcaaacaaaaaagctcaataagatgactgtagaactcatgaatctaaaagaattgggttctttcgatttggaaaacgtcaacgtgtatcctggagtatggaatacatacgatatcttcggtatcgaggccgctcgtgaatacttgtgcgaagccatgttaaacacctatggagaagggttcgattatctgtatcagccttgtgatcttctcgctagtttactatgtgctagttacgaaccagaatcagtgaataaattcaagttcggcgcagctagtactcttaagagagctacgttcggagacaataaagcattgttaaacgcggctcttcataaaaagtcagaacctattaacgataatagtagctgccacttttttagcaaggtccctaatataggaactggatattacaaatactttatcgacttgggtcttctcatgagaatggaaaggaaactatctgataagatatcttctcaaaagatcaaggaaatggaagaaacagaagacttttaattcttatcaataacatatttttctatgatctgtcttttaaacgatggattttccacaaatgcgcctctcaagtccctcatagaatgatacacgtataaaaaatatagcataggcaatgactccttatttttagacattagatatgccaaaatcatagccccgcttctatttactcccgcagcacaatgaaccaacacgggctcgtttcgttgatcacatttagataaaaaggcggttacgtcgtcaaaatatttactaatatcggtagttgtatcatctaccaacggtatatgaataatattaatattagagttaggtaatgtatatttatccatcgtcaaatttaaaacatatttgaacttaacttcagatgatggtgcatccatagcatttttataatttcccaaatacacattattggttacccttgtcattatagtgggagatttggctttgtgcatatctccagttgaacgtagtagtaagtatttatacaaacttttcttatccatttataacgtacaaatggataaaactactttatcggtaaacgcgtgtaatttagaatacgttagagaaaaggctatagtaggcgtacaagcagccaaaacatcaacacttatattctttgttattatattggcaattagtgcgctattactctggtttcagacgtctgataatccagtctttaatgaattaacgagatatatgcgaattaaaaatacggttaacgattggaaatcattaacggatagcaaaacaaaattagaaagtgatagaggtagacttctagccgctggtaaggatgatatatttgaattcaaatgtgtggatttcggcgcctattttatagctatgcgattggataagaaaacatatctgccgcaagctattaggcgaggtactggagacgcgtggatggttaaaaaggcggcaaaggtcgatccatctgctcaacaattttgtcagtatttgataaaacacaagtctaataatgttattacttgtggtaatgagatgttaaatgaattaggttatagcggttattttatgtcaccgcattggtgttccgattttagtaatatggaatagtgttagataaatgcggtaacgaatgttcctgtaaggaaccataacagcttagatttaacgttaaagatgagcataaacataataaacaaaattacaatcaaacttataacattaatatcaaacaatccaaaaaatgaaatcagtggagtagtaaacgcgtacataactcctggataacgtttagcagctgccgttcctattctagaccaaaaattcggtttcatgttttcgaaacggtattctgcaacaagtcgaggatcgtgttctacatatttggcggcattatccagtatctgcctattgatcttcatttcgttttcgattctggctatttcaaaataaaatcccgatgatagacctccagactttataatttcatctacgatgttcagcgccgtagtaactctaataatataggctgataagctaacatcataccctcctgtatatgtgaatatggcatgatttttgtccattacaagctcggttttaactttattgcctgtaataatttctctcatctgtaggatatctatttttttgtcatgcattgccttcaagacgggacgaagaaacgtaatatcctcaataacgttatcgttttctacaataactacatattctacctttttattttctaactcggtaaaaaaattagaatcccatagggctaaatgtctagcgatatttcttttcgtttcctctgtacacatagtgttacaaaaccctgaaaagaagtgagtatacttgtcatcatttctaatgtttcctccagtccactgtataaacgcataatccttgtaatgatctggatcatccttgactaccacaacatttcttttttctggcataacttcgttgtcctttacatcatcgaacttctgatcattaatatgctcatgaacattaggaaatgtttctgatggaggtctatcaataactggcacaacaataacaggagttttcaccgccgccatttagttattgaaattaatcatatacaactctttaatacgagttatattttcgtctatccattgtttcacattgacatatttcgacaaaaagatataaaatgcgtattccaatgcttctctgtttaatgaattactaaaatatacaaacacgtcactgtctggcaataaatgatatcttagaatattgtaacaatttattttgtattgcacatgttcgtgatctatgagttcttcttcgaatggcataggatctccgaatctgaaaacgtataaataggagttagaataataatatttgagagtattggtaatatataaactctttagcggtataattagtttttttctctcaatttctatttttagatgtgatggaaaaatgactaattttgtagcattagtatcatgaactctaatcaaaatcttaatatcttcgtcacacgttagctctttgaagtttttaagagatgcatcagttggttctacagatggagtaggtgcaacaattttttgttctacacatgtatgtactggagccattgttttaactataatggtgcttgtatcgaaaaactttaatgcagatagcggaagctcttcgccgcgactttctacgtcgtaattgggttctaacgccgatctctgaatggatactagttttctaagttctaatgtgattctctgaaaatgtaaatccaattcctccggcattatagatgtgtatacatcggtaaataaaactatagtatccaacgatcccttctcgcaaattctagtcttaaccaaaaaatcgtatataaccacggagatggcgtatttaagagtggattcttctaccgttttgttcttggatgtcatataggaaactataaagtccgcactactgttaagaatgattactaacgcaactatatagtttaaattaagcattttggaaacataaaataactctgtagacgatacttgactttcgaataagtttgcagacaaacgaagaaagaacagacctctcttaatttcagaagaaaactttttttcgtattcctgacgtctagagtttatatcaataagaaagttaagaattagtcggttaatgttgtatttcattacccaagtttgagatttcataatattatcaaaagacatgataatattaaagataaagcgctgactatgaacgaaatagctatatggttcgctcaagaatatagtcttgttaaacgtggaaacgataactgtatttttaatcacgtcagcggcatctaaattaaatataggtatatttattccacacactctacaatatgccacaccatcttcataataaataaattcgttagcaaaattattaattttagtgaaatagttagcgtcaactttcatagcttccttcaatctaatttgatgctcacacggtgcgaattccactctaacatcccttttccatgcctcaggttcatcgatctctataatatctagttttttgcgtttcacaaacacaggctcgtctctcgcgatgagatctgtatagtaactatgtaaatgataactagatagaaagatgtagctatatagatgacgatcctttaagagaggtataataactttaccccaatcagatagactgttgttatggtcttcggaaaaagaatttttataaatttttccagtattttccaaatatacgtacttaacatctaaaaaatccttaatgataataggaatggataatccgtctattttataaagaaatacatatcgcacattatacttttttttggaaatgggaataccgatgtgtctacataaatatgcaaagtctaaatattttttagagaatcttagttggtccaaattcttttccaagtacggtaatagatttttcatattgaacggtatcttcttaatctctggttctagttccgcattaaatgatgaaactaagtcactatttttataactaacgattacatcacctctaacatcatcatttaccagaatactgatcttcttttgtcgtaaatacatgtctaatgtgttaaaaaaaagatcatacaagttatacgtcatttcatctgtggtattcttgtcattgaaggataaactcgtactaatctcttctttaacagcctgttcaaatttatatcctatatacgaaaaaatagcaaccagtgtttgatcatccgcgtcaatattctgttctatcgtagtgtataacaatcgtatatcttcttctgtgatagtcgatacgttataaaggttgataacgaaaatatttttatttcgtgaaataaagtcatcgtaggattttggacttatattcgcgtctagtagatatgcttttatttttggaatgatctcaattagaatagtctctttagagtccatttaaagttacaaacaactaggaaattggtttatgatgtataatttttttagtttttatagattctttattctatacttaaaaaatgaaaataaatacaaaggttcttgagggttgtgttaaattgaaagcgagaaataatcataaattatttcattatcgcgatatccgttaagtttgtatcgtaatggcgtggtcaattacgaataaagcggatactagtagcttcacaaagatggctgaaatcagagctcatctaaaaaatagcgctgaaaataaagataaaaacgaggatattttcccggaagatgtaataattccatctactaagcccaaaaccaaacgagccactactcctcgtaaaccagcggctactaaaagatcaaccaaaaaggaggaagtggaagaagaagtagttatagaggaatatcatcaaacaactgaaaaaaattctccatctcctggagtcagcgacattgtagaaagcgtggccgctgtagagctcgatgatagcgacggggatgatgaacctatggtacaagttgaagctggtaaagtaaatcatagtgctagaagcgatctctctgacctaaaggtggctaccgacaatatcgttaaagatcttaagaaaattattactagaatctctgcagtatcgacggttctagaggatgttcaagcagctggtatctctagacaatttacttctatgactaaagctattacaacactatctgatctagtcaccgagggaaaatctaaagttgttcgtaaaaaagttaaaacttgtaagaagtaaatgcgtgcacttttttataaagatggtaaactctttaccgataataattttttaaatcctgtatcagacgataatccagcgtatgaggttttgcaacatgttaaaattcctactcatttaacagatgtagtagtatatgaacaaacgtgggaggaggcgttaactagattaatttttgtgggaagtgattcaaaaggacgtagacaatacttttacggaaaaatgcatgtacagaatcgcaacgctaaaagagatcgtatttttgttagagtatataacgttatgaaacgaattaattgttttataaacaaaaatataaagaaatcgtccacagattccaattatcagttggcggtttttatgttaatggaaactatgttttttattagatttggtaaaatgaaatatcttaaggagaatgaaacagtagggttattaacactaaaaaataaacacatagaaataagtcccgatgaaatagttatcaagtttgtaggaaaggacaaagtttcacatgaatttgttgttcataagtctaatagactatataaaccgctattgaaactgacggatgattctagtcccgaagaatttctgttcaacaaactaagtgaacgaaaggtatacgaatgtatcaaacagtttggtattagaatcaaggatctccgaacgtatggagtcaattatacgtttttatataatttttggacaaatgtaaagtccatatctcctcttccgtcaccaaaaaagttaatagcattaactatcaaacaaactgctgaagtggtaggtcatactccatcaatttcaaaaagagcttatatggcaacgactattttagaaatggtaaaggataaaaattttttagatgtagtatctaaaactacgttcgatgaattcctatctatagtcgtagatcacgttaaatcatctacggatggatgatatagatctttacacaaataattacaagaccgataaatggaaatggataagcgtatgaaatctctcgcaatgacagctttcttcggagagctaagcacattagatattatggcattgataatgtctatatttaaacgccatccaaacaataccattttttcagtggataaggatggtcagtttatgattgatttcgaatacgataattataaggcttctcaatatttggatctgaccctcactccgatatctggagatgaatgcaagactcacgcatcgagtatagccgaacaattggcgtgtgcggatattattaaagaggatattagcgaatatatcaaaactactccccgtcttaaacgatttataaaaaaataccgcaatagatcagatactcgtatcagtcgagatacagaaaagcttaaaatagctctagctaaaggcatagattacgaatatataaaagacgcttgttaataagtaaatgaaaaaaaactagtcgtttataataaaacacgatatggatgccaacgtagtatcattttctactattgcgacgtatatagacgctttagcgaagaatgcttcggaattagaacagaggtctaccgcatacgaaataaataatgaattggaactagtatttattaagccgccattgattactttgacaaatgtagtgaatatctctacgattcaggaatcgtttattcgatttaccgttactaataaggaaggtgttaaaattagaactaagattccattatctaaggtacatggtctagatgtaaaaaatgtacagttagtagatgctatagataacatagtttgggaaaagaaatcattagtgacggaaaatcgtcttcacaaagaatgcttgttgagactatcgacagaggaacgtcatatatttttggattacaagaaatatggatcctctatccgactagaattagtcaatcttattcaagcaaaaacaaaaaactttacgatagactttaagctaaaatattttctaggatccggtgcccagtctaaaagttctttgttgcacgctattaatcatccaaagtcaaggcctaatacatctctggaaatagaattcacacctagagacaatgaaacagttccatatgatgaactaataaaggaattgacgactctctcgcgtcatatatttatggcttctccagagaatgtaattctttctccgcctattaacgcgcctataaaaacctttatgttgcctaaacaagatatagtaggtttggatctggaaaatctatatgccgtaactaagactgacggcattcctataactatcagagttacatcaaacgggttgtattgttattttacacatcttggttatattattagatatcctgttaagagaataatagattccgaagtagtagtctttggtgaggcagttaaggataagaactggaccgtatatctcattaagctaatagagcctgtgaatgcaatcaatgatagactagaagaaagtaagtatgttgaatctaaactagtggatatttgtgatcggatagtattcaagtcaaagaaatacgaaggtccgtttactacaactagtgaagtcgtcgatatgttatctacatatttaccaaagcaaccagaaggtgttattctgttctattcaaagggacctaaatctaacattgattttaaaattaaaaaggaaaatactatagaccaaactgcaaatgtagtatttaggtacatgtccagtgaaccaattatctttggagaatcgtctatctttgtagagtataagaaatttagcaacgataaaggctttcctaaagaatatggttctggtaagattgtgttatataacggcgttaattatctaaataatatctattgtttggaatatattaatacacataatgaagtgggtattaagtccgtggttgtacctattaagtttatagcagaattcttagttaatggagaaatacttaaacctagaattgataaaaccatgaaatatattaactcagaagattattatggaaatcaacataatatcatagtcgaacatttaagagatcaaagcatcaaaataggagatatctttaacgaggataaactatcggatgtgggacatcaatacgccaataatgataaatttagattaaatccagaagttagttattttacgaataaacgaactagaggaccgttgggaattttatcaaactacgtcaagactcttcttatttctatgtattgttccaaaacatttttagacgattccaacaaacgaaaggtattggcgattgattttggaaacggtgctgacctggaaaaatacttttatggagagattgcgttattggtagcgacggatccggatgctgatgctatagctagaggaaatgaaagatacaacaaattaaactctggaattaaaaccaagtactacaaatttgactacattcaggaaactattcgatccgatacatttgtctctagtgtcagagaagtattctattttggaaagtttaatatcatcgactggcagtttgctatccattattcttttcatccgagacattatgctaccgtcatgaataacttatccgaactaactgcttctggaggcaaggtattaatcactaccatggacggagacaaattatcaaaattaacagataaaaagacttttataattcataagaatttacctagtagcgaaaactatatgtctgtagaaaaaatagctgatgatagaatagtggtatataatccatcaacaatgtctactccaatgactgaatacattatcaaaaagaacgatatagtcagagtgtttaacgaatacggatttgttcttgtagataacgttgatttcgctacaattatagaacgaagtaaaaagtttattaatggcgcatctacaatggaagatagaccgtctacaaaaaactttttcgaactaaatagaggagccattaaatgtgaaggtttagatgtcgaagacttacttagttactatgttgtttatgtcttttctaagcggtaaataataatatggtatgggttctgatctcccagttctaaatgcattaaataattccaatagagcgatttttgttcctataggaccttccaactgtggatactctgtattgttaatagatatattaatacttttgtcgggtaacagaggttctacgtcttctaaaaataaaagttttataacatctggcctgttcataaataaaaacttggcgattctatatatactcttattatcaaatctagccattgtcttatagatgtgagctactgtaggtgtaccatttgattttctttctaatactatatatttctctcgaagaagttcttgcacatcatctgggaataaaatactactgttgagtaaatcagttattttttttatatcgatattgatggacatttttatagttaaggataataagtatcccaaagtcgataacgacgataacgaagtatttatacttttaggaaatcacaatgactttatcagattaaaattaacaaaattaaaggagcatgtatttttttctgaatatattgtgactccagatacatatggatctttatgcgtcgaattaaatgggtctagttttcagcacggcggtagatatatagaggtggaggaatttatagatgctggaagacaagttagatggtgttctacatccaatcatatatctaaagatatacccgaagatatgcacactgataaatttgtcatttatgatatttatacgtttgattcgttcaagaataaacgattggtattcgtacaggtacctccgtcgttaggagatgatagtcatttgactaatccgttattgtcaccgtattatcgtaattcagtagccagacaaatggtcaatgatatgatttttaatcaagattcatttttaaaatatttattagaacatctgattagaagccactatagagtttctaaacatataacaatagttagatacaaggataccgaagaattaaatctaacgagaatatgttataatagagataagtttaaggcgtttgtattcgcttggtttaacggcgtttcggaaaatgaaaaggtactagatacgtataaaaaggtatctaatttgatataatgaattcagtgactgtatcacacgcgccatatactattacttatcacgatgattgggaaccagtaatgagtcaattggtagagttttataacgaagtagccagttggctgctacgagacgagacgtcgcctattcctgataagttctttatacagttgaaacaaccgcttagaaataaacgagtatgtgtgtgtggtatagatccgtatccgaaagatggaactggtgtaccgttcgaatcaccaaattttacaaaaaaatcaattaaggagatagcttcatctatatctagattaaccggagtaattgattataaaggttataaccttaatataatagacggggttataccctggaattattacttaagttgtaaattaggagaaacaaaaagtcacgcgatttactgggataagatttccaagttactgctgcagcatataactaaacacgttagtgttctttattgtttgggtaaaacagatttctcgaatatacgggccaagttagaatccccggtaactaccatagtcggatatcatccagcggctagagaccgccaattcgagaaagatagatcatttgaaattatcaacgttttactggaattagacaacaaggcacctataaattgggctcaagggtttatttattaatgctttagtgaaattttaacttgtgttctaaatggatgcggctattagaggtaatgatgttatctttgttcttaagactataggtgtcccgtcagcgtgcagacaaaatgaagatccaagatttgtagaagcatttaaatgcgacgagttagaaagatatattgagaataatccagaatgtacactattcgaaagtcttagggatgaggaagcatactctatagtcagaattttcatggatgtagatttagacgcgtgtctagacgaaatagattatttaacggccattcaagattttattatcgaggtgtcaaactgtgtagctagattcgcgtttacagaatgcggcgccattcatgaaaatgtaataaaatccatgagatctaatttttcattgactaagtctacaaatagagataaaacaagttttcatattatctttttagatacgtataccactatggatacattgatagctatgaaacgaacactattagaattaagtagatcatctgaaaatccactaaccagatcgatagacactgccgtatataggagaaaaacaactcttcgggttgtaggtactaggaaaaatccaaattgcgacactattcatgtaatgcaaccaccgcatgataatatagaagattacctattcacttacgtggatatgaacaacaatagttattacttttctctacaacaacgattggaggatttagttcctgataagttatgggaaccagggtttatttcattcgaagacgctataaaaagagtttcaaaaatattcattaattctataataaactttaatgatctcgatgaaaataattttacaacggtaccactggtcatagattacgtaacaccttgtgcattatgtaaaaaacgatcgcataaacatccgcatcaactatcgttggaaaatggtgctattagaatttacaaaactggtaatccacatagttgtaaagttaaaattgttccgttggatggtaataaactgtttaatattgcacaaagaattttagacactaactctgttttattaaccgaacgaggagaccatatagtttggattaataattcatggaaatttaacagcgaagaacccttgataacaaaactaattttgtcaataagacatcaactacctaaggaatattcaagcgaattactctgtccaagaaaacgaaagactgtagaagctaacatacgagacatgttagtagattcagtggagaccgatacctatccggataaacttccgtttaaaaatggtgtattggacctggtagacggaatgttttactctggagatgatgctaaaaaatatacgtgtactgtatcaaccggatttaaatttgacgatacaaagttcgtcgaagacagtccagaaatggaagagttaatgaatatcattaacgatatccaaccattaacggatgaaaataagaaaaatagagagctatatgaaaaaacattatctagttgtttatgcggtgctaccaaaggatgtttaacattcttttttggagaaactgcaactggaaagtcgacaaccaaacgtttgttaaagtctgctatcggtgacctgtttgttgagacgggtcaaacaattttaacagatgtattggataaaggacctaatccatttatcgctaacatgcatttgaaaagatctgtattctgtagcgaactacctgattttgcctgtagtggatcaaagaaaattagatctgacaatattaaaaagttgacagaaccttgtgtcattggaagaccgtgtttctccaataaaattaataatagaaaccatgcgacaatcattatcgatactaattacaaacctgtttttgataggatagataacgcattaatgagaagaattgccgtcgtgcgattcagaacacacttttctcaaccttctggtagagaggctgctgaaaataatgacgcgtacgataaagtcaaactattagacgaggggttagatggtaaaatacaaaataatatatatagatttgcatttctatacttgttggtgaaatggtacaaaaaatatcatgttcctattatgaaactatatcctacacccgaagagattcctgactttgcattctatctcaaaataggtactctgttggtatctagctctgtaaagcatattccattaatgacggacctctccaaaaagggatatatattgtacgataatgtggtcactcttccgttgactactttccaacagaaaatatccaagtattttaattctagactatttggacacgatatagagagcttcatcaatagacataagaaatttgccaatgttagtgatgaatatctgcaatatatattcatagaggatatttcatctccgtaaatatatgctcatatatttatagaagatatcacatatctaaatgaataccggaatcatagatttatttgataatcatgttgatagtataccaactatattacctcatcagttagctactctagattatctagttagaactatcatagatgagaacagaagcgtgttattgttccatattatgggatcaggtaaaacaataatcgctttgttgttcgccttggtagcttccagatttaaaaaggtttacattctagtgccgaacatcaacatcttaaaaattttcaattataatatgggtgtagctatgaacttgtttaatgacgaattcatagctgagaatatctttattcattccacaacaagtttttattctcttaattataacgataacgtcattaattataacggattatctcgctacaataactctatttttatcgttgatgaggcacataatatctttgggaataatactggagaacttatgaccgtgataaaaaataaaaacaagattccttttttactattgtctggatctcccattactaacacacctaatactctgggtcatattatagatttaatgtccgaagagacgatagattttggtgaaattattagtcgtggtaagaaagtaattcagacacttcttaacgaacgcggtgtgaatgtacttaaggatttgcttaaaggaagaatatcatattacgaaatgcctgataaagatctaccaacgataagatatcacggacgtaagtttctagatactagagtagtatattgtcacatgtctaaacttcaagagagagattatatgattactagacgacagctatgttatcatgaaatgtttgataaaaatatgtataacgtgtcaatggcagtattgggacaacttaatctgatgaataatttagatactttatttcaggaacaggataaggaattgtacccaaatctgaaaataaataatggcgtgttatacggagaagaattggtaacgttaaacattagttccaaatttaaatactttattaatcggatacagacactcaacggaaaacattttatatacttttctaattctacatatggcggattggtaattaaatatatcatgctcagtaatggatattctgaatataatggttctcagggaactaatccacatatgataaacggcaaaccaaaaacatttgctatcgttactagtaaaatgaaatcgtctttagaggatctattagatgtgtataattctcctgaaaacgatgatggtagtcaattgatgtttttgttttcatcaaacattatgtccgaatcctatactctaaaagaggtaaggcatatttggtttatgactatcccagatactttttctcaatacaaccaaattcttggacgatctattagaaaattctcttacgccgatatttctgaaccagttaatgtatatcttttagccgccgtatattccgatttcaatgacgaagtgacgtcattaaacgattacacacaggatgaattaattaatgttttaccatttgacatcaaaaagctgttgtatctaaaatttaagacgaaagaaacgaatagaatatactctattcttcaagagatgtctgaaacgtattctcttccaccacatccatcaattgtaaaagttttattgggagaattggtcagacaatttttttataataattctcgtattaagtataacgataccaagttacttaaaatggttacatcagttataaaaaataaagaagacgctaggaattacatagatgatattgtaaacggtcacttctttgtatcgaataaagtatttgataaatctcttttatacaaatacgaaaacgatattattacagtaccgtttagactttcctacgaaccatttgtttggggagttaactttcgtaaagaatataacgtggtatcttctccataaaactgatgagatatataaagaaataaatgtcgagctttgttaccaatggatacctttccgttacattggaaccacacgagctgacgttagacataaaaactaatattaggaatgccgtatataagacgtatctccatagagaaattagtggtaaaatggccaagaaaatagaaattcgtgaagacgtggaattacctctcggcgaaatagttaataattctgtagttataaacgttccgtgtgtaataacctacgcgtattatcacgttggggatatagtcagaggaacattaaacatcgaagatgaatcaaatgtaactattcaatgtggagatttaatctgtaaactaagtagagattcgggtactgtatcatttagcgattcaaagtactgcttttttcgaaatggtaatgcgtatgacaatggcagcgaagtcactgccgttctaatggaggctcaacaaggtatcgaatctagttttgtttttctcgcgaatatcgtcgactcataaaaaagagaatagcggtaagtataaacacgaatactatggcaataattgcgaatgttttattctcttcgatatatttttgataatatgaaaaacatgtctctctcaaatcggacaaccatctcataaaatagttctcgcgcgctggagaggtagttgccgctcgtataatctctccagaataatatacttgcgtgtcgtcgttcaatttatacggatttctatagttctctgttatataatgcggtttgccctcatgattagacgacgacaatagtgttctaaatttagatagttgatcagaatgaatgtttattggcgttggaaaaattatccatacagcgtctgcagagtggttgatagttgttcctagatatgtaaaataatccaacttactaggcagcaaattgtctagataaaatactgaatcaaacggtgcagacgtattggcggatctaatggaatccaattgattaactatcttttgaaaatatacatttttatgatccaatacttgtaagaatatagaaataatgataagtccatcatcgtgtttttttgcctcttcataagaactatattttttcttattccaatgaacaagattaatctctccagagtatttgtacacatctatcaagtgattggatccataatcgtcttcctttccccaatatatatgtagtgatgataacacatattcattggggagaaaccctccacttatatatcctcctttaaaattaatccttactagttttccagtgttctggatagtggttggtttcgactcattataatgtatgtctaacggcttcaatcgcgcgttagaaattgcttttttagtttctatattaataggagatagttgttgcggcatagtaaaaatgaaatgataactgtttaaaaatagctcttagtatgggaattacaatggatgaggaagtgatatttgaaactcctagagaattaatatctattaaacgaataaaagatattccaagatcaaaagacacgcatgtgtttgctgcgtgtataacaagtgacggatatccgttaataggagctagaagaacttcattcgcgttccaggcgatattatctcaacaaaattcagattctatctttagagtatccactaaactattacggtttatgtactacaatgaactaagagaaatctttagacggttgagaaaaggttctatcaacaatatcgatcctcactttgaagagttaatattattgggtggtaaactagataaaaaggaatctattaaagattgtttaagaagagaattaaaagaggaaagtgatgaacgtataacagtaaaagaatttggaaatgtaattctaaaacttacaacacgggataaattatttaataaagtatatataagttattgcatggcgtgttttattaatcaatcgttggaggatttatcgcatactagtatttacaatgtagaaattagaaagattaaatcattaaatgattgtattaacgacgataaatacgaatatctgtcttatatttataatatgctagttaatagtaaatgaacttttacagatctagtataattagtcagattattaagtataatagacgactagctaagtctattatttgcgaggatgactctcaaattattacactcacggcattcgttaaccaatgcctatggtgtcataaacgagtatccgtgtccgctattttattaactactgataacaaaatattagtatgtaacagacgagatagttttctctattctgaaataattagaactagaaacatgtttagaaagaaacgattatttctgaattattccaattatttgaacaaacaggaaagaagtatactatcgtcatttttttctctagatccagctactactgataatgatagaatagacgctatttatccgggtggcatacccaaaaggggtgagaatgttccagagtgtttatccagggaaattaaagaagaagttaatatagacaattcttttgtattcatagacactcggttttttattcatggcatcatagaagataccattattaataaattttttgaggtaatcttctttgtcggaagaatatctctaacgagtgatcaaatcattgatacatttaaaagtaatcatgaaatcaaggatctaatatttttagatccgaattcaggtaatggactccaatacgaaattgcaaaatatgctctagatactgcaaaacttaaatgttacggccatagaggatgttattatgaatcattaaaaaaattaactgaggatgattgattaaaaaatataaattaatttaccatcgtgtatttttataacgggattgtccggcatatcatgtagatagttaccgtctacatcgtatactcgaccatctacgcctttaaatcctctatttattgacattaatctattagaattggaataccaaatattagtaccctcaattagtttattggtaatattttttttagacgatagatcgatggctcttgaaaccaaggttttccaaccggactcattgtcgatcggtgagaagtctttttcattagcatgaatccattctaatgatgtatgtttaaacactctaaacaattggacaaattcttttgatttgctttgaatgatttcaaataggtcttcgtctacagtaggcataccattagataatctagccattataaagtgcacgtttacatatctacgttctggaggagtaagaacgtgactattgagacgaatggctcttcctactatctgacgaagagacgcctcgttccatgtcatatctaaaatgaagatatcattaattgagaaaaaactaataccctcgcctccactagaagagaatacgcatgttttaatgcattctccgttagtgtttgattcttggttaaactcagccaccgccttgattctagtatcttttgttctagatgagaactctatattagagataccaaagactttgaaatatagtaataagatttctattcctgactgattaacaaatggttcaaagactagacatttaccatgggatgctaatattcccaaacatacatctataaatttgacgcttttctcttttaattcagtaaatagagagatatcagccgcactagcatcccctttcaatagttctccctttttaaaggtatctaatgcggatttagaaaactctctatctcttaatgaatttttaaaatcattatatagtgttgctatctcttgcgcgtattcgcccggatcacgattttgtctttcaggaaagctatcgaacgtaaacgtagtagccatacgtctcagaattctaaatgatgatatacctgtttttatttcagcgagtttagccttttgataaatttcttcttgctttttcgacatattaacgtatcgcattaatactgttttcttagcgaatgatgcagacccttctacgtcatcaaaaatagaaaactcgttattaactatatacgaacatagtcctcctagtttggagactaattctttttcatcgactagacgtttattctcaaatagcgattggtgttgtaaggatcctggtcgtagtaagttaaccaacatggtgaattcttgcacactattgacgataggtgtagccgataaacaaatcatcttatggttttttaacgcaatggtcttagataaaaaattatatactgaacgagtaggacggatcttaccatcttctttgattaatgatttagaaatgaagttatgacattcatcaataatgacgcatattctactcttggaattaatagttttgatattagtaaaaaatttatttctaaaattttgatcatcgtaattaataaaaatacaatccttcgttatctctggagcgtatctgagtatagtgttcatccaaggatcttctatcaaagcctttttcaccaataagataatagcccaattcgtataaatatccttaagatgtttgagaatatatacagtagtcattgttttaccgacacccgtttcatggaacaataaaagagaatgcatactgtctaatcctaagaaaactcttgctacaaaatgttgataatccttgaggcgtactacgtccgaccccatcatttcaacgggcatattagtagttctgcgtaaggcataatcgatataggccgcgtgtgatttactcatttatgagtgataagtaataactatgttttaaaaatcacagcagtagtttaactagtcttctctgatgtttgttttcgatactttttgaatcagaagtcatactagaataaagcaacgagtgaacgtaatagagagcttcgtatactctattcgaaaactctaagaacttattaatgaattccgtatccactggattgtttaaaatactaaattgaacactgttcacatccttccaagaagaagacttagtgacggacttaacatgagacataaataaatccaaattttttttacaaacatcactagccaccataatggcgctatctttcaaccagctatcgcttacgcattttagcagtctaacatttttaaagagactacaatatattctcatagtatcgattacacctctaccgaataaagttggaagtttaataatacaatatttttcgtttacaaaatcaaataatggtcgaaacacgtcgaaggttaacatcttataatcgctaatgtatagattgttttcagtgagatgattattagatttaatagcatctcgttcacgtttgaacagtttattgcgtgcgctgaggtcggcaactacggcgtccgctttagtactcctcccataatactttacgctattaatctttaaaatttcatagactttatctagatcgctttctggtaacatgatatcatgtgtaaaaagttttaacatgtcggtcggcattctatttagatcattaactctagaaatctgaagaaagtaattagctccgtattccagactaggtaatgggcttttacctagagacagattaagttctggcaatgtttcataaaatggaagaaggacatgcgttccctcccggatattttttacaatttcatccatttacaactctatagtttgttttcattattattagttattatctcccataatcttggtaatacttaccccttgatcgtaagataccttatacaggtcattacatacaactaccaattgtttttgtacataatagattggatggttgacatccatggtggaataaactactcgaacagatagtttatctttccccctagatacattagccgtaatagttgtcggcctaaagaatatctttggtgtaaagttaaaagttagggttcttgttccattattgctttttgtcagtagttcattataaattctcgagatgggtccgttctctgaatatagaacatcatttccaaatctaacttctagtctagaaataatatcggtcttattcttaaaatctattcccttgatgaagggatcgttaatgaacaaatccttggcctttgattcggctgatctattatctccgttatagacgttacgttgactagtccaaagacttacaggaatagatgtatcgatgatgttgatactatgtgatatgtgagcaaagattgttctcttagtggcatcactatatgttccagtaatggcggaaaactttttagaaatgttatatataaaagaattttttcgtgttccaaacattagcagattagtatgaagataaacactcatattatcaggaacattatcaatttttacatacacatcagcatcttgaatagaaacgataccatcttctggaacctctacgatctcggcagactccggataaccagtcggtgggccatcgctaacaataactagatcatccaacaatctactcacatatgcatctatataatctttttcatcttgtgagtaccctggatacgaaataaatttattatccgtatttccataataaggtttagtataaacagagagagatgttgccgcatgaacttcagttacagtcgccgttggttggtttatttgacctattactctcctaggtttctctataaacgatggtttaatttgtacattcttaaccatatatccaataaagctcaattcaggaacataaacaaattctttgttgaacgtttcaaagtcgaacgaagagtcacgaataacgatatcggatactggattgaaggttaccgttacggtaatttttgaatcggatagtttaagactgctgaatgtatcttccacatcaaacggagttttaatataaacgtatactgtagatggttctttaatagtgtcattaggagttaggccaatagaaatatcattaagttcactagaatatccagagtgtttcaaagcaattgtattattgatacaattattatataattcttcgccctcaatttcccaaataacaccgttacacgaagagatagatacgtgattaatacatttatatccaacatatggtacgtaactgaatcttcccatacctttaacttctggaagttccaaactcagaaccaaatgattaagcgcagtaatatactgatccctaatttcgaagctagcgatagcctgattgtctggaccatcgtttgtcataactccggatagagaaatatattgcggcatatacaaagttggaatttgactatcgactgcgaagacattagaccgtttaatagagtcatccccaccgatcaaagaattaatgatagtattattcattttctatttaaaatggaaaaagcttacaataaactccgtagagaaatatctataatttgtgagttttccttaaagtaacagcttccgtaaacgccgtctttatctcttagtaggtttattgtatttatgaccttttccttatcttcatagaatactaaaggcaacaaagaaatttttggttcttctctaagagctacgtgagacttaaccatagaagccaacgaatccctacatattttagaacagaaataccctacttcaccacccttgtatgtctcaatactaataggtctaaaaaccaaatcttgattacaaaaccaacacttatcaattacactatttgtcttaatagacacatctgccatagatttataatactttggtagtatacaagcgagtgcttcttctttagcgggcttaaagactgctttaggtgctgaaataaccacatctggaaggcttactcgcttagccatttaattacggaactatttttttatacttctaatgagcaagtagaaaacctctcatctacaaaaacgtactcgtgtccataatcctctaccatagttacacgttttttagatctcatatgtgctaaaaagttttcccatactaattggttactattatttttcgtataatttttaacagtttgaggttttagatttttagttacagaagtgatatcgaatattttatccaaaaagaatgaataattaattgtcttagaaggagtgttttcttggcaaaagaataccaagtgcttaaatatttctactacttcattaatcttttctgtactcagattcagtttctcatcttttacttgattgattatttcaaagactaacttataatcctttttatttattctctcgttagccttaagaaaactagatacaaaatttgcatctacatcatccgtggatatttgatttttttccatgatatccaagagttccgagataatttctccagaacattgatgagacaataatctccgcaatacatttctcaaatgaataagtttattagacacgtggaagtttgactttttttgtacctttgtacatttttgaaataccgactcgcaaaaaatacaatattcatatccttgttcagatactataccgttatgtctacaaccgctacataatcgtagattcatgttaacactctacgtatctcgtcgtccaatattttatataaaaacattttatttctagacgttgccagaaaatcctgtaatatttttagttttttgggctgtgaataaagtatcgccctaatattgttaccgtcttccgccaatatagtagttaaattatccgcacatgcagaagaacaccgcttaggcggattcagtacaatgttatatttttcgtaccaactcatttaaatatcataatctaaaatagttctgtaatatgtctagcgctaatatattgatcataatcctgtgcataaattaagatacaacaatgtctcgaaatcatcgacatggcttcttccatagttagaagatcgtcgtcaaagttagcaacgtgattcatcaacatttgctgttttgaggcagcaaatactgaaccgtcgccattcaaccattcataaaaaccatcgtctgaatccattgataatttcttgtactggtttttgagagctcgcatcaatctagcatttctagctcccggattgaaaacagaaagaggatcgtacatccagggtccattttctgtaaatagaatcgtataatgtcccttcaagaagatatcagacgatccacaatcaaagaattggtctccgagtttgtaacaaactgcggactttaacctatacatgataccgtttagcataatttctggtgatacgtcaatcggagtatcatctattagagatctaaagccggtgtaacattctccaccaaacatattcttattctgacgtcgttctacataaaacatcattgctccattaacgataacaggggaatgaacagcactacccatcacattagttcccaatggatcaatgtgtgtaactccagaacatcttccatagcctatgttaggaggagcgaacaccactcttccactattgccatcgaatgccatagaataaatatccttggaattgatagaaatcggactgtcggatgttgtgatcatcttcataggattaacaactatgtatggtgccgcctgaagtttcatatcgtaactgatgccgtttataggtctagccacagaaaccaacgtaggtctaaatccaactatagacaaaatagaagccaatatctgttcctcatctgtcataacttgagagcatccagtatgaataatcttcattagatggggatctaccgcatcatcatcgttacaataaaaaattcccattctaatgttcataattgcttttctaatcatggtatgcatgtttgctctctgaatctctgtggaaattagatctgatacacctgtaatcactatcggattatcctccgtaagacgattaaccaacaacatataattataagactttacttttctaaattcataaagttgctggattaggctataggtgtctccatgtacatacgcgttctcgagcgcaggaagtttaataccgaatagtgccatcagaataggatgaatatagtaattagtttctggttttctataaataaaagacaaatcttgtgaactagacatatcggtaaaatgcatggattggaatcgtgtagtcgacagaagaatatgatgattagatggagagtatattttatctaactctttgagttggtcaccgattctaggactagctcgagaatgaataagtactaaaggatgagtacatttcacagaaacactagcattgttcaatgtgctctttacatgggtaaggagttgaaatagctcgtttctatttgttctgacaatatttagtttattcataatgttaagcatatcctgaatagtaaagttagatgtgtcatacttgttagtagttagatatttagcaattgcattcccatcatttctcaatctcgtactccaatcatgcgtggatgctacttcgtcgatggaaaccatacaatcctttttgataggctgttgagattgatcatttcctgcacgtttaggtttggtacgttgatttctagcccctgcggatataaagtcatcgtctacaatttgggacaatgaattgcatacactacaagacaaagatttatcagaagtgtgaatatgatcttcatctaccaaagaaagagtttgattagtataactagattttagtcctgcgttagatgttaaaaaaacatcgctattgaccacggcttccattatttatattcgtagtttttactcgaaagcgtgattttaatatccaatcttattacttttggaatcgttcaaaacctttgactagttgtagaatttgatctattgccctacgcgtatactcccttgcatcatatacgttcgtcaccagatcgtttgtttcggcctgaagttggtgcatatctctttcaacattcgacatgagatccttaagggccatatcgtctagattttgttgagatgctgctcctggatttggattttgttgtgctgttgtacatactgtaccaccagtaggtgtaggagtacatacagtggccacaataggaggttgagaaagtgtaaccgttggagtagtacaagaaatacttccatccgattgttgtgtacatgtagttgttggtaacgtctgagaaggttgggtagatggcggcgtcgtcgttttttgatctttattaaatttagagataatatcctgaacagcattgctcggcgtcaacgctggaaggagtgaactcgccggcgcatcagtatcttcagacagccaatcaaaaagattagacatatcagatgatgtattagtttgttgtcgtggttttggtgtaggagcagtactactaggtagaagaataggagccgatgtagctgttggaaccggctgtggagttatatgaatagttggttgtagcggttggataggctgtctgctggcggccatcatattatctctagctagttgttctcgcaactgtctttgataatacgactcttgagactttagtcctatttcaatcgcttcatcctttttcgtatccggatccttttcttcagaataatagattgacgactttggtgtagaggattctgccagcctctgtgagaacttgttaaagaagtccatttaaggctttaaaattgaattgcgattataagattaaatggcagacacagacgatattatcgactatgaatccgatgatctcaccgaatacgaggatgatgaagaagaggaagaagatggagagtcactagaaactagtgatatagatcccaaatcttcttataagattgtagaatcagcatccactcatatagaagatgcgcattccaatcttaaacatatagggaatcatatatctgctcttaaacgacgctatactagacgtataagtctatttgaaatagcgggtataatagcagaaagctataacttgcttcaacgaggaagattacctctagtttcagaattttctgacgaaacgatgaagcaaaatatgctacatgtaattatacaagagatagaggagggttcttgtcctatagtcatcgaaaagaacggagaattgttgtcggtaaacgattttgacaaagatggtctaaaattccatctagactatattatcaaaatttggaaacttcaaaaacgatattagaatttatacgaatatcgttctctaaatgtcacaatcaagtctcgcatgttcagcaatttattgtcgtactttatatcgtgttcattaacgatatcttgcaaaatagtaatgattctatcttccttcgatagatattcttcagagattattgtcttatattctttcttgttatcagatatgaatttgataagactttgaacattattgatacccgtctgtttaattttttctacagatattttagttttggcagattctatcgtatctgtcaatagacatccaacatcgacattcgacgtcaattgtctataaatcaacgtataaattttagaaataacattagcgaattgttgtgcgttgatgtcgttattctgaaacagtatgattttaggtagcattttcttaacaaagagaacgtatttattgttactcagttgaacagatgatatatccagattactaacgcatctgattccgtataccaaactttcagaagaaatggtatacaattgtttgtattcattcaatgtctctttttcagaaattagtttagagtcgaatactgcaataattttcaagagatagttttcatcagataagattttatttagtgtagatatgataaaactattgttttgttggagaacttgatacgccgcgttctctgtagtcgacgctctcaaatgggaaacaatctccattatttttttggaatcggatactatatcttcggtatcttgacgcagtctagtatacatagagttaagagagattagagtttgtacattaagcaacatgtctctaaatgtggctacaaacttttcctttttcacatcatctagtttattatataccgatttcacaacggcaccagatttaaggaaccagaatgaaaaactctgataactacaatatttcatcatagttacgattttatcatcttctatagttggtgtaatagcgcatacctttttctccaagactggaaccaacgtcataaaaatgtttaaatcaaaatccatatcaacatctgatgcgctaagaccagtctcgcgttcaagattatctttactaatggtgacgaactcatcgtataaaactctaagtttgtccattatttatttacagatttagttgtttaatttatttgtgctcttccagagttgggatagtatttttctaacgtcggtattatattattaggatctacgttcatatgtatcataatattaatcatccacgttttgataaatctatctttagcttctgaaataacgtatttaaacaaaggagaaaaatatttagctacggcatcagacgcaataacattttttgtaaatgtaacgtatttagacgacagatcttcgttaaaaagttttccatctatgtagaatccatcggttgttaacaccattcccgcgtcagattgaataggagtttgaatagtttgttttggaaatagatccttcaataacttatagttgggtgggaaaaaatcgattttatcactagactctttcttttttactatcattacctcatgaactatttcttgaatgagtatatgtattttctttcctatatcggacgcgttcattggaaaatataccatgtcgttaactataagaatatttttatcctcgtttacaaactgaataatatcagatgtagttcgtaaacgaactatatcatcaccagcacaacatctaactatatgatatccactagtttcctttagccgtttattatcttgttccatattagcagtcattccatcatttaagaaggcgtcaaaaataatagggagaaatgacattttggattctgttacaactttaccaaaattaaggatatacggacttactatctttttctcaacgtcaatttgatgaacacacgatgaaaatgtgcttctatgagattgatcatgtagaaaacaacaagggatacaatatttccgcatatcatgaaatatattaagaaatcccaccttattatatttccccaaaggatccatgcacgtaaacattatgccgttatcattaataaagacttctttctcatcggatctgtaaaagttgttactgatttttttcattccaggatctagataattaataatgatgggttttctattcttattctttgtattttggcatatcctagaccagtaaacagtttccactttggtaaaatcagcagacttttgaacgctattaaacatggcattaatggcaataactaaaaatgtaaaatatttttctatgttaggaatatggtttttcactttaatagatatatggtttttggccaaaatgatagatatttttttatccgaggatagtaaaatattattagtcgccgtctctataaaaatgaagctagtctcgatatccaattttattctagaattgataggagtcgccaaatgtaccttatacgttatatctcccttgatgcgttccatttgtgtatctatatcggacacaagatctgtaaatagttttacgttattaatcatcacggtatcgccgtcgctagataacgctaatgtaccatccaagtcccaaatggagagatttaactgttcatcgtttagaataaaatgattaccggtcatattaataaagtgttcatcgtatctagataacaacgacttataattaatgtccaagtcttgaactcgctgaatgatcttttttaacccagttagttttagattggtacgaaatatattgttaaactttgattctacagtaatgtccaaatctagttgtggaaatacttccatcaacattgtttcaaacttgataatattattatctacatcttcgtacgatccaaattccggaatagatgtatcgcacgctctggccacccagataaccaaaaagtcacacgctccaggatatacattgtataaaaagctatcgttttttagtagggtttttttctgcgtgtatacgaagggattaaaaatagtattatcaacgtaactatattccaaattattcttatgagaatagataataatatcgtccttaatatctaacaaatttcctaaatatccctttaattgagtcattcgaagcgtcaatagaatatgtctcttaactatttccggctgttgtatatttaaatgacttcgtaaaaaataatatatgggcgacttctcatctatgtaatcatatggagtgagatatagggctcgttctacctcctgccccttacccacctgtaataccaattgcggacttactatatatcgcatatttatatcgtggggtaaagtgaaaatctactaccgatgatgtaagtcttacaatgttcgaaccagtaccagatcttaatttggaggcctccgtagaactaggggaggtaaatatagatcaaacaacacctatgataaaggagaatagcggttttatatcccgcagtagacgtctattcgcccatagatctaaggatgatgagagaaaactagcactacgattctttttacaaagactttattttttagatcatagagagattcattatttgttcagatgcgttgacgctgtaaaagacgtcactattaccaaaaaaaataacattatcgtggcgccttatatagcacttttaactatcgcatcaaaaggatgcaaacttacagaaacaatgattgaagcattctttccagaactatataatgaacatagtaagaaatttaaattcaactctcaagtatccatcatccaagaaaaactcggataccagtttggaaactatcacgtttatgattttgaaccgtattactctacagtagctctggctattcgagatgaacattcatctggcatttttaatatccgtcaagagagttatctggtaagttcattatctgaaataacatatagattttatctaattaatctaaaatctgatcttgttcaatggagtgctagtacgggcgctgtaattaatcaaatggtaaatactgtattgattacagtgtatgaaaagttacaactggtcatagaaaatgattcacaatttacatgttcattggctgtggaatcaaaacttccaataaaattacttaaagatagaaatgaattatttacaaaattcattaacgagttaaaaaagaccagttcattcaagataagcaaacgcgataaggatacgctactaaaatattttacttaggactggagttagaatttatagacgactcatttcgtttatcattgttactattattactattactatcattattagtgttggcattattagtattcttcttgtcatcttgttcagaaatatacagcaatgctatacctaatactaaatacattatcatgctcgcaatggctctaacaacaacgaaccaaaatgaatttggtcgtagcttttgttcacaaaaatacataaagaaatgtctacataaatctatggcgccattggctacttgaaatagcgccagtcctcctacagattttaatatagctgtataacatgacatttattcatcatcaaaagagacagagtcaccatctgtcatatttagattttttttcatgtgttcaaagtatcctctactcatttcattataatagtttatcatacttagaattttaggacggatcaatgagtaagacttgactagatcgtcagtagtaatttgtgcatcgtctattctgcatccgcttcgtcgaataatgtatagcatcgctttgagattctccatagctatcaagtctttatacaatgacatggaaatatctgtgaatactttatacttctccaacatcgatgccttaacatcatcgcctactttagcattgaaaatacgttctattgtgtagatggatgtagcaagatttttaaacaacaatgccatcttacacgatgattgcctcaagtctccaatcgtttgtttagaacgattagctacagagtccaatgcttggctgactagcatattattatctttagaaattgtattcttcaatgaggcgtttatcatatctgtgatttcgttagtcatattacagtctgactgggttgtaatgttatccaacatatcacctatggatacggtacacgtaccagcatttgtaataatcctatctaagatgttgtatggcattgcgcagaaaatatcttctcctgtaatatctccactctcgataaatctactcagattattcttaaatgccttattctctggagaaaagatatcagtgtccatcatttcattaatagtatacgcagaaaagataccacgagtatcaattctatccaagatacttatcggttccgagtcacagataatggtttcctctccttcgggagatcctgcatagaaatatctaggacaatagtttctatactgtctgtaactctgataatctctaaagtcactaactgataccatgaaattgagaagatcaaacgctgaagtaattaatttttctgcctcgtttttactacaactagttttcatcaatgtagtgacgatgtattgtttagttacttttggtctaatactgatgatagagatattattgcttcccataatggatcttctagtagtcaccttaaagcccattgatgcgaatagcagatagataaagtcttggtatgactcctttctaatatagtacggactacctttgtcacccaactttatacccacataagccataacaacctctttaatagccgtttcatgaggtttatcagccatgagcctgagtagttggaagaatctcatgaatcccgtctcagaaagtcctatatgcatgatagatttatctttcctgggaaactctcgtatagtcatagatgaaatactctttaaagtttctgaaataagattagtaacagtcttacctccgactactctaggtaacaaacaaactctaataggtgttttctctgcggagataatatcagaaaggatagagcaataagtagtattattgtgattataaagaccgaatacataacaggtagaatttataaacatcatgtcctgaaggtttttagacttgtattcctcgtaatccataccgtcccaaaacatggatttggtaactttgatagccgtagatctttgttccttcgccaacaggttaaagaaattaataaagaatttgttgtttctatttatgtccacaaattgcacgtttggaagcgccacggttacattcactgcagcattttgaggatcgcgagtatgaagtacgatgttattgtttactggtatatctggaaagaaatctaccagtctaggaataagagattgatatcgcatagaaatagtaaagtttataatctcatcatcgaagagcattttgttaccattgtaataaatatccactctgtcatatgtataaatgaagtactgttcaaacatgatgagatgtttatatgttggcatagtagtgagatcgacgtttggtaatggcaatgtattaagattaactccataatgtctagcagcatctgcgatgttataagcgtcgtcaaagcggggtcgatcttgtattgttatatattgtctaacacctataagattatcaaaatcttgtctgcttaatacaccgttaacaatttttgccttgaattcttttattggtgcattaataacatccttatagaggatgttaaacaaataagtgttatcaaagttaagatctggatatttcttttctgctagaacatccattgagtcggagccatctggtttaatataaccaccgataaatctagctctgtattctgtatccgtcaatctaatattaagaaggtgttgagtgaaaggtggaagatcgtaaaagctgtgagtattaatgataggattagtttccgaactaatgttaattggggtattaataatatctatatttccagcgttaagtgtaacattaaacagttttaattcacgtgacgtggtatcaattaaataattaatgcccaatttggatatagcagcctgaagctcatcttgtttagttacggatcctaatgagttattaagcaatatatcgaacggatgaacgaaggttgttttaagttggtcacatactttgtaatctagacatagatgcggaagaacggtagaaactatacgaaataaatattcagagtcctctaattgatcaagagtaactattgacttaataggcatcatttatttagtattaaatgacgaccgtaccagtgacggatatacaaaacgatttaattacagagttttcagaagataattatccatctaacaaaaattatgaaataactcttcgtcaaatgtctattctaactcacgttaacaacgtggtagatagagaacataatgccgccgtagtgtcatctccagaggaaatatcctcacaacttaatgaagatctatttccagatgatgattcaccggccactattatcgaacgagtacaacctcatactactattattgacgatactccacctcctacgtttcgtagagagttattaatatcggaacaacgtcaacaacgagaaaaaagatttaatattacagtatcgaaaaatgctgaagcaataatggaatctagatctatgataacttctatgccaacacaaacaccatccttgggagtagtttatgataaagataaaagaattcagatgttagaggatgaagtggttaatcttagaaatcaacgatctaatacaaaatcatctgataatttagataattttaccaaaatactatttggtaagactccgtacaaatcaacagaagttaataagcgtatagccatcgttaattatgcaaatttgaacgggtcccccttatcagtcgaggacttggatgtttgttcggaggatgaaatagatagaatctataaaacgattaaacaatatcacgaaagtagaaaacgaaaaattatcgtcactaacgtgattattattgtcataaacattatcgagcaggcattgctaaaactcggatttgaagaaatcaaaggactgagtaccgatatcacttcagaaattatcgatgtggagatcggagatgactgcgatgctgtagcatctaaactaggaatcggtaacagtccggttcttaatattgtattgtttatactcaagatattcgttaaacgaattaaaattatttaatttaatacattcccatatccagacaacaatcgtctggattaatctgttcctgtcgtctcataccggacgacatattaatctttttattagtgggcatctttttagatggtttctttttcccagcattaactgagtcgatacctagaagatcgtgattgatctctccgaccattccacgaacttctaattggccgtctctgacggtaccataaactattttaccagcattagtaacagcttggacaatctgaccatccatcgcattgtacgatgtagtagtaactgttgttctacgtctaggagcaccagaagtatttttggagcccttggatgttgatgtagaagaagacgaggattttgattttggtttacatgtaatacattttgaactctttgattttgtatcacatgcgccggcagtcacatctgtttgagaattaagattattgttgcctcctttgacggctgcatctccaccgatttgcgctagtagatttttaagctgtggtgtaatcttattaactgtttcgatataatcatcgtaactgcttctaacggctaaattttttttatccgccatttagaagctaaaaatatttttatttatgcagaagatttaactagattatacaatgaactaatatgatccttttccagattatttacaaacttggtattttttggttctggaggaggcgaatttaaattcggacttggattcggattttgtaagttcttgatcttattatacatcgagtataggatggcgacagtaactgctacacaaataccgatcaaaagaagaataccaatcatttattgacaataacttcactattgatcaagtatgcaatatatcatcttttcactaaataagtagtaataatgattcaacaatgtcgagatatatggacgataataatttagttcatggaaatatcgctatgattggtgtgaatgactccgctaactctgtggggtgcgcagtgctttccccacatagaataaattagcattccgactgtgataataataccaagtataaacgccataatactcaatactttccatgtacgagtgggactggtagacttactaaagtcaataaaggcgaagatacacgaaagaatcaaaagaatgattccagcgattagcacgccggaaaaataatttccaatcataagcatcatgtccatttaactaataaaaattttaaatcgccgaatgaacaaagtggaatataaaccatataaaaacaatagtttgtactgcaaaaataatatctatttttgttttcgaagatatggtaaaattaaatagtagtacacagcatgttataactaacagcagcaacggctcgtaattacttatcatttactagacgaaaaggtggtgggatattttcttgctcaaataatacgaatatatcacccatccattttatgcgatgtttatatactctaatctttaatagatctatagacgacgggtttaccaacaatatagattttatcgattcatctaatttaaacccttccttaaacgtgaatgatctattatctggcataacgatgaccctacctgatgaatcggacaatgtactgggccatgtagaataaattatcaacgaattatcgtctacgaacatttatatcatttgttttaattttaggacgcgaataaatggatataaaatagaaaataacagatattacaaccagtgttatggccgcgcccaaccaggtaggcagttttattttatcttttactacaggttctcctggatgtacgtcaccaacggcggacgtagttctagtacaattagacgtaagttccgcttgggaattttttaacgctaaagagttaacgttaatcgtgcacccaacgtatttacatctagttcgttgaacatcttgattataatataaccattttctatctctagattcgtcagtgcactcatgtaaccaacataccctaggtcctaaatatttatctccggaattagattttggataattcgcgcaccaacaatttctatttcctttatgatcgttacaaaagacgtataatgccgtatccccaaaagtaaaataatcaggacgaataattctaataaactcagaacaatatctcgcatccatatgtttggagcaaatatcggaataagtagacatagccggtttccgttttgcacgtaaccattctaaacaattggggtttccaggatcgtttctacaaaatccagtcatgaaatcgtcacaatgttctgtcttgtaattattattaaatatttttggacagtgtttggtatttgtcttagaacaacattttgccacgctatcactatcgcccaggagataatccttttttataaaatgacatcgttgcccggatgctatataatcagtagcgtgttttaaatccttaatatattcaggagttacctcgttctgataatagattaatgatccaggacgaaatttgaaagaactacatggttctccatgaattaatacatattgtttagcaaattcaggaactataaaactactacaatgatctatcgacataccatctatcaaacaaaacttgggtttaatttctcccggagatgtttcataatagtacgtataactttcttctgcaaacttaacagctctattatattcaggataattaaaacctaattccatatatttgtctcgtatatctgctattcctggtgctattttgattctattaagagtaacagctgcccccattcttaataatcgtcagtatttaaactgttaaatgttggtatatcaacatctaccttatttcccgcagtataaggtttgttgcaggtatactgttcaggaatggttacatttatacttcttctatagtcctgtctttcgatgttcatcacatatgcaaagaacagaataaacaaaataatgtaagaaataatattaaatatctgtgaattcgtaaatacattgattgccataataattacagcagctacaatacacacaatagacattcccacagtgttgccattacctccacgatacatttgagttactaagcaataggtaataactaagctagtaagaggcaatagaaaagatgagataaatatcatcaatatagagattagaggagggctatatagagccaagacgaacaaaatcaaaccgagtaacgttctaacatcattatttttgaagattcccaaataatcattcattcctccataatcgttttgcatcatacctccatctttaggcataaacgattgctgctgttcctctgtaaataaatctttatcaagcactccagcacccgcagagaagtcgtcaagcatattgtaatatcttaaataactcatttatatattaaaaaatgtcactattaaagatggagtataatctttatgccgaactaaaaaaaatgacttgtggtcaacccctaagtctttttaacgaagacggggatttcgtagaagttgaaccgggatcatcctttaagtttctgatacctaagggattttacgcctctccttccgtaaagacgagtctagtattcgagacattaacaacgaccgataataaaatcactagtatcaatccaacaaatgcgccaaagttatatcctcttcaacgcaaagtcgtatctgaagtagtttctaatatgaggaaaatgatcgaatcaaaacgtcctctatacatcactcttcacttggcgtgtggatttggtaagactattaccacgtgttatcttatggctacacacggtagaaaaaccgtcatttgcgtacccaataaaatgttaatacatcaatggaagacacaggtagaggcagtcggattggaacataagatatccatagatggagtaagtagtctattaaaggaactaaagactcaaagtccggatgtattaatagtagtcagtagacatctgacaaacgatgccttttgtaaatatatcaataagcattatgatttgttcatcttggatgaatcacatacgtataatctgatgaacaatacagcagttacaagatttttagcgtattatcctccgatgatgtgttattttttaactgctacacctagaccatctaaccgaatttattgtaacagtattattaatattgccaagttatccaatctaaaaaaaactatctatgcagtagatagtttttttgagccatattccacagataatattagacatatggtaaaacgactagatggaccatctaataaatatcatatatataccgagaagttattatctgtagacgagcctagaaatcaacttattcttgataccctggtagaagaattcaagtcaggaactattaatcgcattttagttattactaaactacgtgaacatatggtattattctacaaacgattattagattttttcggaccagaggttgtatttataggagacgcccaaaatagacgtactccagatatggtcaaatcaatcaaggaactaaatagatttatattcgtatccaccttattttattccggtactggtttagatattcctagtttggattcgttgttcatttgctcggcagtaatcaacaatatgcaaatagagcaattactagggagggtatgtcgagaaacagaactattagataggacggtatatgtatttcctaacacatccatcaaagaaataaagtacatgataggaaatttcatgcaacgaattattagtctgtctgtagataaactaggatttaaacaaaaaagttatcggaaacatcaagaatccgatcccacttctgcatgtacaacatcatccagagaagaacgtgtattaaatagaatatttaactcgcaaaatcgttaagaagtttaagcgacgatccgcatgctgcgcaggccagtgtattacccctcatagtattaatataatccaatgatacttttgtgatgtcggaaatcttaaccaatttagactgacaggcagaacacgtcatgcaatcatcatcgtcatcgataactgtagtcttgggcttctttttgcgactcttcattccggaacgcacattggtgctatccatttaggtagtaaaaaataagtcagaatatgccctataacacgatcgtgcaaaacctggtatatcgtctctatctttatcacaatatagtgtatcgacatttttattattattgacctcgtttatcttggaacatggaatgggaacatttttgttatcaacggccatctttgccttaattccagatgttgtaaaattataactaaacagtctatcatcgacacaaatgaaattcttgtttagacgtttgtagtttacgtatgcggctcgttcgcgtctcattttttcagatattgcaggtactataatattaaaaataagaatgaaataacataggattaaaaataaagttatcatgacttctagcgctgatttaactaacttaaaagaattacttagtctgtacaaaagtttgagattttcagattctgcggctatagaaaagtataattctttggtagaatggggaacatctacttactggaaaataggcgtgcaaaaggtagctaatgtcgagacgtcaatatctgattattatgatgaggtaaaaaataaaccgtttaatattgatccgggctattacattttcttaccggtatattttgggagcgtctttatttattcgaagggtaaaaatatggtagaacttggatctggaaactcttttcaaataccagatgatatgcgaagtgcgtgtaacaaagtattagacagcgataacggaatagactttctgagatttgttttgttaaacaatagatggataatggaagatgctatatcaaaatatcagtctccagttaatatatttaaactagctagtgagtacggattaaacatacccaaatatttagaaattgaaatagaggaagacacattatttgacgacgagttatactctattatagaacgctctttcgatgataaatttccaaaaatatccatatcgtatattaagttgggagaacttagacggcaagttgtagactttttcaaattctcattcatgtatattgagtccatcaaggtagatcgtataggagataatatttttattcctagcgttataacaaaatcaggaaaaaagatattagtaaaagatgtagaccatttaatacgatccaaggttagagaacatacatttgtaaaagtaaaaaagaaaaacacattttccattttatacgactatgatggaaacggaacagaaactagaggagaagtaataaaacgaattatagacactataggacgagactattatgttaacggaaagtatttctctaaggttggtagtgcaggcttaaagcaattgactaataaattagatattaatgagtgcgcaactgtcgatgagttagttgatgagattaataaatccggaactgtaaaacgaaaaataaaaaaccaatcagcatttgatttaagcagagaatgtttgggatatccagaagcggattttataacgttagttaataacatgcggttcaaaatagaaaattgtaaggttgtaaatttcaatattgaaaatactaattgtttaaataacccgagtattgaaactatatatggaaactttaaccagttcgtctcaatctttaatgtcgtcaccgatgtcaaaaaaagattattcgagtgaaataatatgcgcctttgatataggtgcaaaaaatcctgccagaactgttttagaagtcaaggataactccgttagggtattggatatatcaaaattagactggagttctgattgggaaaggcgcatagctaaagatttgtcacaatatgaatacactacagttcttctagaacgtcagcctagaaggtcgccgtatgttaaatttatctattttattaaaggctttttatatcatacatcggctgccaaagttatttgcgtctcgcctgtcatgtctggtaattcatatagagatcgaaaaaagagatcggtcgaagcatttcttgattggatggacacattcggattgcgagactccgttccggatagacgcaaattagacgatgtagcggatagtttcaatttggctatgagatacgtattagataaatggaatactaattatacaccttataataggtgtaaatctagaaattacataaaaaaaatgtaataacgttagtaacgccattatggataatctatttacctttctacatgaaatagaagatagatatgccagaactatttttaactttcatctaataagttgcgatgaaataggagatatatatggtcttatgaaagaacgcatttcctcagaggatatgtttgataatatagtgtataataaagatatacatcctgccattaagaaactagtgtattgcgacatccaacttactaaacacattattaatcagaatacgtatccggtatttaacgattcttcacaagtgaaatgttgtcattatttcgacataaactcagataatagcaatattagctctcgtacagtagagatatttgagagggaaaagtcatctcttgtatcatatattaaaactaccaataagaagagaaaggtcaattacggcgaaataaagaaaactgttcatggaggcactaatgcaaattacttttccggtaaaaagtctgacgagtatctgagtactacagttagatccaacattaatcaaccttggatcaaaaccatctctaagaggatgagagttgatatcattaatcactctatagtaacgcgtggaaaaagctctatattacaaactatagaaattatttttactaatagaacatgtgtgaaaatattcaaggattctactatgcacattattctatccaaggacaaggatgaaaaggggtgtatacacatgattgacaaattattctatgtctattataatttatttctgttgttcgaagatatcatccaaaacgagtactttaaagaagtagctaatgttgtaaaccacgtactcacggctacggcattagatgagaaattattcctaattaagaaaatggctgaacacgatgtttatggagttagcaatttcaaaatagggatgtttaacctgacatttattaagtcgttggatcataccgttttcccctctctgttagatgaggatagcaaaataaagttttttaaggggaaaaagctcaatattgtagcattacgatctctggaggattgtataaattacgtgactaaatccgagaatatgatagaaatgatgaaggaaagatcgactattttaaatagcatagatatagaaacggaatcggtagatcgtctaaaagaattgcttctaaaatgaaaaaaaacactaattcagaaatggatcaacgactagggtataagtttttggtgcctgatcctaaagccggagttttttatagaccgttacatttccaatatgtatcgtattctaattttatattgcatcgattgcatgaaatcttgaccgtcaagcggccactcttatcgtttaagaataatacagaacgaattatgatagaaattagcaatgttaaagtgactcctccagattactcacctataatcgcgagtattaaaggtaagagttatgacgcattagccacgttcactgtaaatatctttaaagaggtaatgaccaaagagggtatatccatcactaaaataagtagttatgagggaaaagattctcatttgataaaaattccgctactaataggatacgggaataaaaatccacttgatacagccaagtatcttgttcctaatgtcataggtggagtctttatcaataaacaatctgtcgaaaaagtaggaattaatctagtagaaaagattacaacatggccaaaatttagggttgttaagccaaactcattcactttctcgttttcctccgtatcccctcctaatgtattaccgacaagatatcgccattacaagatatctctggatatatcacaattggaagcgttgaatatatcatcgacaaagacatttataacggtcaatattgttttgctgtctcaatatttatctagagtgagtctagaattcattagacgtagtttatcatacgatatgcctccagaagttgtctatctagtaaacgcgataatagatagtgctaaacgaattactgaatctattactgactttaatattgatacatacattaatgacctggtggaagctgaacacattaaacaaaaatctcagttaacgatcaacgagttcaaatatgaaatgctgcataactttttacctcatatgaactatacacccgatcaactaaagggattttatatgatatctttactaagaaagtttctctactgtatcttccacacttctagatatccagatagagattcgatggtttgtcatcgcatcctaacgtacggcaaatattttgagacgttggcacatgatgaattagagaattacataggcaacatccgaaacgatatcatgaacaatcacaagaacagaggcacttacgcggtaaacattcatgtactaacaactcccggacttaatcacgcgttttctagcttattgagtggaaagttcaaaaagtcagacggtagttatcgaacacatcctcactattcatggatgcagaatatttctattcctaggagtgttggattttatccggatcaagtaaagatttcaaagatgttttctgtcagaaaataccatccaagtcaatatctttacttttgttcatcagacgttccggaaagaggtcctcaggtaggtttagtatctcaattgtctgtcttgagttccattacaaatatactaacgtctgagtatttggatttggaaaagaaaatttgtgagtatatcagatcatattataaagatgatataagttactttgaaacaggatttccaatcactatagaaaatgctctagtcgcatctcttaatccaaatatgatatgtgattttgtaactgactttagacgtagaaaacggatgggattcttcggtaacttggaggtaggtattactttagttagggatcacatgaatgaaattcgcattaatattggagcgggaagattagtcagaccattcttggttgtggataacggagagctcatgatggatgtgtgtccggagttagaaagcagattagacgacatgacattctctgacattcagaaagagtttccgcatgtcatcgaaatggtagatatagaacaatttacttttagtaacgtatgtgaatcggttcaaaaatttagaatgatgtcaaaggatgaaagaaagcaatacgatttatgtgactttcctgccgaatttagagatggatatgtagcatcttcattagtgggaatcaatcacaattctggacccagagctattcttggatgtgctcaagctaaacaagctatctcttgtctgagctcggatatacgaaataaaatagacaatggaattcatttgatgtatccagagaggccaatcgtgattagtaaggctttagaaacttcaaagattgcggctaattgcttcggccaacatgttactatagcattaatgtcgtacaaaggtatcaatcaagaggatggaattatcatcaaaaaacaatttattcagagaggcggtctcgatattgttacagccaagaaacatcaagtagaaattccattggaaaactttaataacaaagaaagagataggtctaacgcctattcaaaattagaaagtaatggattagttagactgaatgctttcttggaatccggagacgctatggcacgaaatatctcatcaagaactcttgaagatgattttgctagagataatcagattagcttcgatgtttccgagaaatataccgatatgtacaaatctcgcgttgaacgagtacaagtagaacttactgacaaagttaaggtacgagtattaaccatgaaagaaagaagacccattctaggagacaaatttaccactagaacgagtcaaaagggaacagtcgcgtatgtcgcggatgaaacggaacttccatacgacgaaaatggtatcacaccagatgtcattattaattctacatccatcttctctagaaaaactatatctatgttgatagaagttattttaacagccgcatattctgctaagccgtacaacaataagggagaaaaccgacctgtctgttttcctagtagtaacgaaacatccatcgatacatatatgcaattcgctaaacaatgttatgagcattcaaatccgaaattgtccgatgaagaattatcggataaaatcttttgtgaaaagattctctatgatcctgaaacggataagccttatgcatccaaagtattttttggaccaatttattacttgcgtctgaggcatttaactcaggacaaggcaaccgttagatgtagaggtaaaaagacgaagctcattagacaggcgaatgagggacgaaaacgtggaggaggtatcaagttcggagaaatggagagagactgtttaatagcgcatggtgcagccaatactattacagaagttttgaaagattcggaagaagattatcaagatgtgtatgtttgtgaaaattgtggagacatagcagcacaaatcaagggtattaatacatgtcttagatgttcaaaacttaatctctctcctctcttaacaaaaattgataccacgcacgtatctaaagtatttcttactcaaatgaacgccagaggcgtaaaagtcaaattagatttcgaacgaaggcctccttcgttttataaaccattagataaagttgatctcaagccgtcttttctggtgtaatattctagtttggtagtagatacatatcaatatcatcaaattcgagatccgaattataaaatgggcgtggattgttaactatagaatcggacgtctgatattcgaaaatctgtggagtttcaggttttggtggaggtgtaactgctacttgggatactgaagtctgatattcagaaagctgtggatgttctggttcggcatccaccgatggtgtcacatcactaatcggttcggtaacgtctgtggatggaggtgctacttctacagaacctgtagcctcagttgtcaacggagatacatttttaatgcgagaaaatgtataatttggtaatggtttcttatgtggatctgaagaagaggtaagatatctactagaaagataccgatcacgttctagttctcttttgtagaacttaactttttctttctccgcatctagttgatattccaacctcttcacgttactacgttcagattccaattcacgttcgcatgggttacctccgcagtttttacgagcgatttcacgttcagccttcatgcgtctctccctctctctatcgagtttatcagagcagtctttctgaaggcgatcgaactccataaatttctccaacgctttgattgtttccatagatttccgaagttcagcttttaggactgtgattctttttctttcgaattcacagctggatgtacaaccgtttccattaccgccatctctaagtttcttttctagatcggcaacatttcatccccatgccttttacattcctcgagtctactgtcgtcgaaatatcgttccagctccttttcgacatcaataactttagcacgttgtctctcaagctctcttttgtagttatctgattccctggcacgtttaagatcttcatgcaattgagtcagctcttaacttcctctcttgcttcttcgtcatagtacgcgcaatcactgtgagatccattgttaccacgtctacactcggcgagctcgcgtttaagagattcaatttcccgtttgtattggtccatgtttccattgctaccaccattagatttacaggctgctagttgtcgttcgagatcagaaatacgggttttcttggaattgatttcgtcgatgtacttggcatcgaaacacttattaagttctttttccaattctacgattttatttctttcgcgagtcaattccctcctgtagtaactatctgttttgtcagattcacgctctctacgtagactttcttgcaagttactaatttgttccctagcacgtccgagtttagttttatatgctgaatagagttctgattcatcctttgagcagatctctagcgatcgtttaagattcctaattctagtctttagcctatttacctcctcagaagatgttccgttaccgttgcgtttacactcgttaagctgtctatcaagatccatgattctatctctaagacgttgcatctctctttccatatcagcattgctttcattattacgtctgcagtcactcaactgtctttcaatatctgagattctatctctaagacgtcgcatctctctctgtttcggcattggtttcattattacgtttacagtcgttcaactgtctttcaagatctgatattctagattggagtctgctaatctctgtagcattttcacggcattcactcagttgtctttcaagatctgaaattttagattggagtctgctaatctctgtaagatttcctcctccgctctcgatgcagtcggtcaacttattctctagttctctaatacgcgaacgcagtgcatcaacttcttgcgtgtcttcctggttgcgtgtacattcatcgagatctctaacgcgtcgtcgttcttcctcaagttctctgcgtactacagaaagcgtgtccctatcttgttgatatttagcaatttctgattctagagtactgattttgcttacgtagttactaatagttgtcttggccttatcaagatcctccttgtatttgtcgcattccttgatatccctacgaagtctggacagttcccattcgacattacgacgtttatcgatttcagctcggagatcgtcatcgcgttgttttagccacatacgactgagttcaagttctcgttgacaagatccatctacttttccattcctaatagtatccagttccttttctagttctgaacgcatttctcgttccctatcaagcgattctctcaattctcggatagtcttcttatcaatttctaataaatctgaaccatcatctgtcccattttgaatatccctgtgttctttgatctcttttgtaagtcggtcgattctttcggttttataaacagaatccctttccaaagtcctaatcttactgagtttatcactaagttctgcattcaattcggtgagttttctcttggcttcttccaactctgttttaaactctccactatttccgcattcttcctcgcatttatctaaccattcaattagtttattaataactagttggtaatcagcgattcctatagccgttcttgtaattgtgggaacataattaggatcttctaatggattgtatggcttgatagcatcatctttatcattattagggggatggacaaccttaattggttggtcctcatctcctccagtagcgtgtggttcttcaataccagtgttagtaataggcttaggcaaatgcttgtcgtacgcgggcacttcctcatccatcaagtatttataatcgggttctacttcagaatattcttttctaagagacgcgacttcgggagttagtagaagaactctgtttctgtatctatcaacgctggaatcaatactcaagttaaggatagcgaatacctcatcgtcatcatccgtatcttctgaaacaccatcatatgacatttcatgaagtctaacgtattgataaatagaatcagatttagtattaaacagatccttaacctttttagtaaacgcatatgtatattttagatctccagatttcataatatgatcacatgccttaaatgtcagtgcttccatgatataatctggaacactaatgggtgacgaaaaagatacagcaccatatgctacgttgataaataaatctgaaccactaagtagataatgattaatgttaagaaagaggaaatattcagtgtataggtatgtcttggcgtcatatcttgtactaaacacgctaaacagtttgttaatgtgatcaatttccaatagattaattagagcagcgggaataccaacaaacatattaccacatccgtattttctatgaatatcacatatcatgttaaaaaatcttgatagaagagcgaatatctcgtctgacttaatgagtcgtagttcagcagcaacataagtcataactgtaaatagaacatactttcctgtagtgttgattctagactccacatcaacaccattattaaaaatagttttatatacatctttaatctgctctccgttaatcgtcgaacgttctagtatacggaaacactttgatttcttatctgtagttaatgacttagtgatatcacgaagaatattacgaattacatttcttgtttttcttgagagacctgattcagaactcaactcatcgttccatagtttttctacctcagtggcgaaatctttggagtgcttggtacatttttcaataaggttcgtgacctccatttattataaaaaatttattcaaaacttaactacaatcgggtaattataagatcgtagatctcccatgtggcggaatactaccatctatcgcatgtggatggacagtaggtaatggccatgggaacagtaatgtttgcatatttatctttcttgctagtattactgcatattgtcccaatgtttcgatgtgatgttctaacctatcaactgccgctgtatcacaacaatagtgtccgatgaaattaagattatgatccaatgtgtttaatatatgattatcaagtcttatacgatccgcgtcttttttgacaggatcaggttcttctacaggaagaagtttcggcctcttatgatattcatgtctgggaaacggtggtctagggtgaggctccggtatcggagtgggttttggattataatcatcatcgtctatgacatcatcttcgacttcgatatttattttgctatcttgatgatgtcctgtatcagttgcattttcagcactcgactgaatattagcgcattcattgtctattattaccatatttctaaacccaaaatgtatgtgttgaacatcagtactatcgttgatgagtcttatagcatgaattcgcttatcgttatcgggtttatcttctgtcaccttagcaattccttttttattaaactctacataatcatatccatttctattgtttgttctaatataaacgagtatagcatcattgctaaatttttcaatagtatcaaaaacagaatatcctaaaccatataatatatattcaggaacactcaaactaaatgtccaggattctcctaaatacgtaaactttaatagtgcgaaatcattcaaaaatctaccacttatagatagatagtacataaatgcgtatagtagtctacctatctctttattatgaaaaccggcattacgatcatatatgtcgtgatatacctgtgatccgtttacgttaaaccataaatacatgggtgatcctataaacatgaatttatttctaattctcagagctatagttaattgaccgtgtaatatttgcttacatgcatacttgatacgcttattaataagatttttatcattgctcgttatttcagaatcgtatatataaggagtaccatcgtgattcttaccagatattatacaaaatactatatataaaatatattgacccacgttagtaatcatataaatgtttaacgttttaaattttgtattcaatgatccattatcatacgctatcatggtcttgtaatattcattctttaaaatataatattgtgttagccattgcattggagctcctaatggagattttctattctcatccattttaggataggctttcataaagtccctaataacttcgtgaataatgtttctatgttttctactgatgcatgtatttgcttcgatttttttatcccatgtttcatctatcatagatttaaacgcagtaatgctcgcaacattaacatcttgaaccgttggtacaattccgttccataaatttataatgttcgccatttatataactcattttttgaatatacttttaattaacaaaagagttaagttactcatatggacgccgtccagtctgaacatcaatctttttagccagagatatcatagccgctcttagagtttcagcgtgattttccaacctaaatagaacttcatcgttgcgtttacaacacttttctatttgttcaaactttgttgttacattagtaatctttttttccaaattagttagccgttgtttgagagtttcctcattgtcgtcttcatcggctttaacaattgcttcgcgtttagcctctggctttttagcagcctttgtagaaaaaaattcagttgctggaattgcaagatcgtcatctccggggaaaagagttccgtccatttaaagtacagattttagaaactgacactctgcgttatttatatttggtacaacacatggattataaatattgatgttaataacatcagaaaatgtaaagtctatacattgttgcatcgtgttaaattttctaatggatctagtattattgggtccaacttctgcctgaaatccaaatatggaagcggatacaaaaccgtttcctggataaaccacacatctccacttttgctttacatcagaaattgtgtcgttgacatcttgaactctcctatctaatgccggtgttccacctatagattttgaatattcgaatgctgcatgagtagcattaaattccttaatattgccataattttcatatattgagtaaccctggataaaaagtaaacacaccgcagccgtcgctaccacaataaaaaaaattgatagagagttcatttataatctattagaagctgacaaaatttttttacacgcatcagacaatgctttaataaatagttcaacatctacttttgtcatatcgaaccgatggtatgattctaacctagaattacatccgaaaaagttgactatgttcatagtcattaagtcattaacaaacaacattccagactctggattataagacgatactgtttcgtcacaattacctaccttaatcatgtgattatgaatattggctattagagcaccttctaagaaatctataatatctttgaaacacgatttaaaatcaaaccacgaatatacttctacgaagaaagttagtttacccataggagaaataactataaatggagatctaaatacaaaatccggatctatgatagttttaacattattatattctctattaaatacctccacatctaaaaatgttaattttgaaactatgtcttcgtttattaccgtacctgaactaaacgctataagctctattgtttgagaactctttaaacgatattcttgaaatacatgtaacaaagtttcctttaactcggtcggtttatctaccatagttacagaatttgtatccttatctataatataataatcaaaatcgtataaagttatataattatcgcgttcagattgtgatcttttcaaatagactaaaaaccccatttctctagtaagtatcttatgtatatgtttgtaaaatatcttcatggtgggaatatgctctaccgcagttagccattcctcattgacagcggtagatgtattagacaaaactattccaatgtttaacaagggccattttacgagattattaaatccttgtttgataaatgtagccaatgagggttcgagttcaacgacgattgaattctcttcccgcggatgctgcatgatgaacgacgggatgttgttcgattgatttggaattctttttcgactttttgtttatattaaatattttaaaatttatagcggatagcaattcatgtaccacggataatgtagacgcgtattgcgcatcgatatctttattattagataaatttatcaataaatgtgagaagtttgcctcgttaaggtcttccatttaaatattatataaacatttgtgtttgtatcttattcgtcttttatggaatagttttttactagtaaagctgcaattacacactttgtccgtaaaacataaatataaacaccagcttttatcaatcgttccaaaaagtcgacggcggacatttttaacatggcatctattttaaatacacttaggtttttggaaaaaacatcattttataattgtaacgattcaataactaaagaaaagattaagattaaacataagggaatgtcatttgtattttataagccaaagcattctaccgttgttaaatacttgtctggaggaggtatatatcatgatgatttggttgtattggggaaggtaacaattaataatctaaagatgatgctattttacatggatttatcatatcatggagtgacaagtagtggagcaatttacaaattgggatcgtctatcgatagactttctctaaataggactattgttacaaaagttaataattatgatgatacattttttgacgacgatgattgatcgctattgcacaattttgtttttgtactttctaatatagtgtttaggttctttttcatatgagaatattgatttactaaaatatctatgtttaacttttgttctatgacgtccttatcggcggtatcggtacatatacgtaattcaccttcacaaaatacggagtcttcgataataatagccaatcgattattggatctagctgtctgtatcatattcaacatgtttaatatatcctttcgtttcccctttacaggcatcgatcgtagcatattttccgcgtctgatatggaaatgttaaaactacaaaaatgcgtaatgttagcccgtcctaatattggtacgtgtctataagtttggcatagtagaataatagacgtgtttaaatgccttccaaagtttaagaattctattagagtattgcattttgatagtttatcgcctacatcatcaaaaataagtaaaaagtgtgctgattttttatgattttgtgcgacagcaatacatttttctatgttacttttagttcgtatcagattatattctagagattcctgactactaacgaaattaatatgatttggccaaatgtatccatcataatctgggttataaacgggtgtaaacaagaatatatgtttatattttttaactagtgtagaaaacagagatagtaaatagatagtttttccagatccagatcctcctgttaaaaccattctaaacggcatttttaataaattttctcttgaaaattgtttttcttggaaacaattcataattatatttacagttactaaattaatttgataataaatcaaaatatggaaaactaaggttgttagtagggaggagaacaaagaaggcacatcgtgatataaataacatttattatcatgatgacaccagaaaacgacgaagagcagacatctgtgttctccgctactgtttacggagacaaaattcagggaaagaataaacgcaaacgcgtgattggtctatgtattagaatatctatggttatttcactactatctatgattaccatgtccgcgtttctcatagtgcgcctaaatcaatgcatgtctgctaacgaggctgctattactgacgccgctgttgccgttgctgctgcatcatctactcatagaaaggttgcgtctagcactacacaatatgatcacaaagaaagctgtaatggtttatattaccagggttcttgttatatattacattcagactaccagttattctcggatgctaaagcaaattgcactgcggaatcatcaacactacccaataaatccgatgtcttgactacctggctcattgattatgttgaggatacatggggatctgatggtaatccaattacaaaaactacatccgattatcaagattctgatgtatcacaagaagttagaaagtatttttgtgttaaaacaatgaactaatatttatttttgtacattaataaatgaaatcgcttaatagacaaactgtaagtaggtttaagaagttgtcggtgccggccgctataatgatgatactctcaaccattattagtggcataggaacatttctgcattacaaagaagaactgatgcctagtgcttgcgccaatggatggatacaatacgataaacattgttatttagatactaacattaaaatgtctacagataatgcggtttatcagtgtcgtaaattacgagctagattgcctagacctgatactagacatctgagagtattgtttagtattttttataaagattattgggtaagtttaaaaaagaccaatgataaatggttagatattaataatgataaagatatagatattagtaaattaacaaattttaaacaactaaacagtacgacggatgctgaagcgtgttatatatacaagtctggaaaactggttaaaacagtatgtaaaagtactcaatctgtactatgtgttaaaaaattctacaagtgacaacaaaaaatgaattaataataagtcgttaacgtacgccgccatggacgccgcgtttgttattactccaatgggtgtgttgactataacagatacattgtatgatgatctcgatatctcaatcatggactttataggaccatacattataggtaacataaaaactgtccaaatagatgtacgggatataaaatattccgacatgcaaaaatgctactttagctataagggtaaaatagttcctcaggattctaatgatttggctagattcaacatttatagcatttgtgccgcatacagatcaaaaaataccatcatcatagcatgcgactatgatatcatgttagatatagaagataaacatcagccattttatctattcccatctattgatgtttttaacgctacaatcatagaagcgtataacctgtatacagctggagattatcatctaatcatcaatccttcagataatctgaaaatgaaattgtcgtttaattcttcattctgcatatcagacggcaatggatggatcataattgatgggaaatgcaatagtaattttttatcataaaagttgtaaagtaaataataaaacaataaatattgaactagtagtacgtatattgagcaatcagaaatgatgctggtacctcttatcacggtgaccgtagttgcgggaacaatattagtatgttatatattatatatttgtaggaaaaagatacgtactgtctataatgacaataaaattatcatgacaaaattaaaaaagataaagagttctaattccagcaaatctagtaaatcaactgatagcgaatcagactgggaggatcactgtagtgctatggaacaaaacaatgacgtagataatatttctaggaatgagatattggacgatgatagcttcgctggtagtttaatatgggataacgaatccaatgttatggcgcctagcacagaacacatttacgatagtgttgctggaagcacgctgctaataaataatgatcgtaatgaacagactatttatcagaacactacagtagtaattaatgaaacggagactgttgaagtacttaatgaagataccaaacagaatcctaactattcatccaatcctttcgtaaattataataaaaccagtatttgtagcaagtcaaatccgtttattacagaacttaacaataaatttagtgagaataatccgtttagacgagcacatagcgatgattatcttaataagcaagaacaagatcatgaacacgatgatatagaatcatcggtcgtatcattggtgtgattagtttcctttttataaaattgaagtaatatttagtattattgctgccgtcacgttgtacaaatggagatattccctgtattcggcatttctaaaattagcaattttattgctaataatgactgtagatattatatagatacagaacatcaaaaaattatatctgatgagatcaatagacagatggatgaaacggtacttcttaccaacatcttaagcgtagaagttgtaaatgacaatgagatgtaccatcttattcctcatagattatcgacgattatactctgtattagttctgtcggaggatgtgttatctctatagataatgacatcaatggcaaaaatattctaacctttcccattgatcatgctgtaatcatatccccactgagtaaatgtgtcgtagttagcaagggtcctacaaccatattggttgttaaagcggatatacctagcaaacgattggtaacatcgtttacaaacgacatactatatgtaaacaatctgtcactgattaattatttgccgttgtctgtattcattattagacgagtcaccgactatttggatagacacatatgcgatcagatatttgctaataataagtggtattcccttataaccatcgacgataagcaatatcctattccatcaaactgtataggtatgtcctctgccaagtacataaattctagcatcgagcaagatactttaatccatgtttgtaacctcgagcatccgttcgactcagtatacaaaaaaatgcagtcgtacaattctctacctatcaaggaacaaatattgtacggtagaattgataatataaatatgagcattagtatttctgtggattaatagatttctagtatggggatcattaatcatctctaatctctaaatacctcataaaacgaaaaaaaagctattatcaaatactgtacggaatggattcattctcttctctttttatgaaactctgttgtatatctactgataaaactggaagcaaaaaatctgatagaaagaataagaataagatcaaggattatatggaacacgattattataaaataacaatagttcctggttcctcttccacgtctactagctcgtggtattatacacatgcctagtaatagtctctttgcgttgacggaaagcagactagaaataacaggctaaaatgttcagacaccataatagttcccaacccagataataacagagttccatcaacacattcctttaaactcaatcccaaacccaaaaccgttaaaatgtatccggccaattgatagtagataatgaggtgtacagcgcatgataatttacacagtaaccaaaatgaaaatactttagtaattataagaaatatagacggtaatgtcatcatcaacaatccgataatatgcctgagagtaaacattgacggataaaacaaaaatgctccgcataactctatcatggcaataacacaaccaaatacttgtaagattcctaaattagtagaaaatacaacgaatatcgatgtataagtgatctcgagaaataataagaataaagtaatgcccgtaaagataaacatcaacattgtttggtaatcattaaaccaattagtatgaagttgaactaatttcacagtagattttattccagtgttatcctcgcatgtataagtacctggtaagatatctttatattccataatcaatgagacatcactatctgataacgaatgaagtctagcactagtatgccatttacttaatattgtcgtcttggaagttttattataagttaaaatatcatggttatccaatttccatctaatatactttgtcggattatctatagtacacggaataatgatggtatcattacatgctgtatactctatggtctttgtagttgttataacaaccaacgtatagaggtatatcaacgatattctaactcttgacattttttatttatttaaaatgatacctttgttatttattttattctattttgctaacggtattgaatggcataagtttgaaacgagtgaagaaataatttctacttacttattagacgacgtattatacacgggtgttaatggggcggtatacacattttcaaataataaactaaacaaaactggtttaactaataataattatataacaacatctataaaagtagaggatgcggataaggatacattagtatgcggaaccaataacggaaatcccaaatgttggaaaatagacggttcagacgacccaaaacatagaggtagaggatacgctccttatcaaaatagcaaagtaacgataatcagtcacaacggatgtgtactatctgacataaacatatcaaaagaaggaattaaacgatggagaagatttgacggaccatgtggttatgatttattcacggcggataacgtaattccaaaagatggtttacgaggagcattcgtcgataaagacggtacttatgacaaagtttacattcttttcactgatactatcggctcaaagagaattgtcaaaattccgtatatagcacaaatgtgcctaaacgacgaaggtggtccatcatcattgtctagtcatagatggtcgacgtttctcaaagtcgaattagaatgtgatatcgacggaagaagttatagacaaattattcattctagaactataaaaacagataatgatacgatactatatgtattcttcgatagtccttattccaagtccgcattatgtacctattctatgaataccattaaacaatctttttctacgtcaaaattggaaggatatacaaagcaattgccgtctccagctcctggtatatgtttaccagctggaaaagttgttccacataccacgtttgaagtcatagaacaatataatgtactagatgatattataaagcctttatctaaccaacctatcttcgaaggaccgtctggtgttaaatggttcgatataaaggagaaggaaaatgaacatcgggaatatagaatatacttcataaaagaaaattctatatattcgttcgatacaaaatctaaacaaactcgtagctcgcaagtcgatgcgcgactattttcagtaatggtaactgcgaaaccgttatttatagcagatatagggataggagtaggaatgccacaaatgaaaaaaatacttaaaatgtaatcttaatcgagtacaccacacgacaatgaacaaacataagacagattatgctggttatgcttgctgcgtaatatgcggtctaattgtcggaattatttttacagcgacactattaaaagttgtagaacgtaaattagttcatacaccattaatagataaaacgataaaagatgcatatattagagaagattgtcctactgactggataagctataataataaatgtatccatttatctactgatcgaaaaacctgggaggaaggacgtaatgcatgcaaagctctaaattcaaattcggatctaattaagatagagactccaaacgagttaagttttttaagaagccttagacgaggctattgggtaggagaatccgaaatattaaaccagacaaccccatataattttatagctaagaatgccacgaagaatggaactaaaaaacggaaatatatttgtagcacaacgaatactcccaaactgcattcgtgttacactatataacaattacactacatttttatcataccactacttcggttagatgttttagaaaaaaataaatatcgccgtaccgttcttgtttttataaaaataacaattaacaattatcaaattttttctttaatattttacgtggttgaccattcttggtggtaaaataatctcttagtgttggaatggaatgctgtttaatgtttccacactcatcgtatattttgacgtatgtagtcacatcgtttacgcaatagtcagactgtagttctatcatgcttcctacatcagaaggaggaacagttttaaagtctcttggttttaatctattaccgttagttttcatgaaatcctttgttttatccacttcacattttaaataaatgtccactatacattcttttgttaattttactagatcgtcatgggtcatagaatttataggttccgtagtccatggatccaaactagcaaacttcgcgtatacggtatcgcgattagtgtatacaccaactgtatgaaaattaagaaaacagtttaataaatcaacagaaatatttaatcctccgtttgatacagatgcgccatatttatggatttcggattcacacgttgtttgtctgaggtgttcgtctagtgttgcttctacgtaaacttcgattcccatatattctttattgtcagaatcgcataccgatttatcatcatacactgtttgaaaactaaatggtatacacatcaaaataataaataataacgagtacattctgcaatattgttatcgtaattggaaaaatagtgttcgagtgagttggattatgtgagtattggattgtatattttattttatattttgtaataagaataaaatgctaatgtcaagtttattccaatagatgtcttattaaaaacatatataataaataacaatggctgaatggcataaaattatcgaggatatctcaaaaaataataagttcgaggatgccgccatcgttgattacaagactacaaagaatgttctagctgctattcctaacagaacatttgccaagattaatccgggtgaaattattcctctcatcactaatcgtaatattctaaaacctcttattggtcagaaatattgtattgtatatactaactctctaatggatgagaacacgtatgctatggagttgcttactgggtacgcccctgtatctccgatcgttatagcgagaactcataccgcacttatatttttgatgggtaagccaacaacatccagacgtgacgtgtatagaacgtgtagagatcacgctacccgtgtacgtgcaactggtaattaaaataaaaagtaatattcatatgtagtgtcaattttaaatgatgatgatgaaatggataatatccatattgacgatgtcaataatgccggtattggcatacagttcatcgatttttagatttcattcagaggatgtggaattatgttatgggcatttgtattttgataggatctataatgtagtaaatataaaatataatccgcatattccatatagatataattttattaatcgcacgttaaccgtagatgaactagacgataatgtcttttttacacatggttattttttaaaacacaaatatggttcacttaatcctagtttgattgtctcattatcaggaaacttaaaatataatgatatacaatgctcagtaaatgtatcgtgtctcattaaaaatttggcaacgagtacatctactatattaacatctaaacataagacttattctctacatcggtccacgtgtattactataataggatacgattctattatatggtataaagatataaatgacaagtataatgacatctatgattttactgcaatatgtatgctaatagcgtctacattgatagtgaccatatacgtgtttaaaaaaataaaaatgaactcttaattatgctatgctattagaaatggataaaatcaaaattacggttgattcaaaaattggtaatgttgttaccatatcgtataacttggaaaagataactattgatgtcacacctaaaaagaaaaaagaaaaggatgtattattagcgcaatcagttgctgtcgaagaggcaaaagatgtcaaggtagaagaaaaaaatattatcgatattgaagatgacgatgatatggatgtagaaagcgcgtaatacgatctataaaaataagtatataaatactttttatttactgtactcttactgtgtagtggtgataccctactcgattatttttttaaaaaaaaaatacttattctgattcttctagccatttccgtgttcgtttgaatgccacatcgacgtcaaagataggggagtagttgaaatctagttctgcattgttggtacgcacctcaaatgtagtgttggatatcttcaacgtatagttgttgagtagtgatggttttctaaatagaattctcttcatatcattcttgcacgcgtacatttttagcatccatcttggaatcctagatccttgttctattcccaatggtttcatcaatagaagattaaacatatcgtacgaacacgatggagagtaatcgtagcaaaagtaagcatttcctttaatcttagatcccggatactggatatattttgcagccaacacgtgcatccatgcagcatttcctacatatacccggctatgcaccgcgtcatcatcgactgtacgatacataatgttaccgtgttgcttacattgctcgtaaaagactttcatcaatttgtctccttctccgtaaattccagtgggtcttaggcaacaagtatacaattttgctccattcatgattacggaattattggctttcataaccagttgctcggccatacgtttactttttgcgtatacatgtcctggtgatatatcataaagggtatgctcatggccgatgaatggatcaccgtgtttattgggtcctattgcttccatgctactagtatagatcaaatacttgattcctaggtccacacaagctgccaaaatagtctgtgttccataatagtttactttcatgatttcattatcggtgtattttccaaatacatccactagagcagccgtatgaataatcagatttaccccatctagcgcttctctcaccttatcaaagtcgtttatatcacattgtatatagtttataaccttaactttcgaggttattggttgtggatcttctacaatatctatgactctgatttcttgaacatcatctgcactaattaacagttttactatatacctgcctagaaatccggcaccaccagtaaccgcgtacacggccattgctgccactcataatatcagactacttattctattttactaaataatggctgtttgtataatagaccacgataatatcagaggagttatttactttgaaccagtccatggaaaagataaagttttaggatcagttattggattaaaatccggaacgtatagtttgataattcatcgttacggagatattagtcaaggatgtgattccataggcagtccagaaatatttatcggtaacatctttgtaaacagatatggtgtagcatatgtttatttagatacagatgtaaatatatttacaattattggaaaggcgttatctatttcaaaaaatgatcagagattagcgtgtggagttattggtatttcttacataaatgaaaagataatacattttcttacaattaacgagaatggcgtttgatatatcagttaatgcgtctaaaacaataaatgcattagtttacttttctactcagcaaaataaattagtcatacgtaatgaagttaatgatacacactacactgtcgaatttgatagggacaaagtagttgacacgtttatttcatataatagacataatgacaccatagagataagaggggtgcttccagaggaaactaatattggttgcgcggttagtatgacttacttgtataataagtatagttttaaactgattttagcagaatatataagacacagaaatactatatccggcaatatttattcggcattgatgacactagatgatttggctattaaacagtatggagacattgatctattatttaatgagaaacttaaagtagactccgattcgggactatttgactttgtcaactttgtaaaggatatgatatgttgtgattctagaatagtagtagctctatctagtctagtatctaaacattgggaattgacaaataaaaaatataggtgtatggcattagccgaacatatatctgatagtattccaatatctgagctatctagactacgatacaatctatgtaagtatctacgcggacacactgagagcatagaggataaatttgattattttgaagacgatgattcgtctacatgttctgccgtaaccgacagggaaacggatgtataattttttttatagcgtgaaggatatgataaaaaatataattgttgtatttatcccattccaatcaccttatatgattctgtaacacaataaaggagtcttatagatgtatagaggtcagatactggtttgataaactgtttattccacataagtatgtttgactttatggttagacccgcatactttaacaaatcactgaaaattggagttaggtattgacctctcagaatcagttgccgttctggaacattaaatgtattttttatgatatactccaacgcatttatgtgggcatacaacaagtcattactaatggaatattccaagagttttagttgtctagtatttaacaagagaagagatttcaacagactgtttatgaactcgaatgccgcctcattgtcgcttatattgatgatgtcgaattctcccaatatcatcaccgatgagtagctcatcttgttatcgggatccaagttttctaaagatgtcattaaaccctcgatcatgaatggatttatcatcatcgtttttatgttggacatgagcttagtccgtttgtccacatctatagaagatgatttctgaattatttcatatatctctctctttaactccaggaacttgtcaggatggtctactttaatatgttctcgtctaagagatgaaaatctttggatggttgcacgcgacttttctctaaaggatgacgttgcccaagatcctctcttaaatgaatccatcttatccttggacaagatggacagtctattttccttagatggtttaatatttttgttacccatgatctataaaggtagacctaatcgtctcggatgaccatatatttattttcagttttattatacgcataaattgtaaaaaatatgttaggtttacgaaaatgtctcgtggggcattaatcgtttttgaaggattggacaaatctggaaaaacaacacaatgtatgaacatcatggaatcaataccttcaaacacaataaaataccttaactttcctcagagatccactgtcactggaaagatgatagatgactatctaactcgtaaaaaaacctataatgatcatatagttaatctattattttgtgcaaatagatgggagtttgcatcttttatacaagaacaactagaacagggaattactttaatagttgatagatacgcattttctggagtagcgtatgccgccgctaaaggcgcgtcaatgactctcagtaagagttatgaatctggattgcctaaacccgacttagttatattcttggaatctggtagcaaagaaattaatagaaacgtcggtgaggaaatttatgaagatgttacattccaacaaaaggtattacaagaatataaaaaaatgattgaagaaggagatattcattggcaaattatttcttctgaattcgaggaagatgtaaagaaggagttgattaagaatatagttatagaggctatacacacggttactggaccagtggggcaactgtggatgtaatagtgaaattacattttttataaatagatgttagtacagtgttataaatggatgaagcatattactctggcaacttggaatcagtactcggatacgtgtccgatatgcataccgaactcgcatcaatatctcaattagttattgccaagatagaaactatagataatgatatattaaacaaggacattgtaaattttatcatgtgtagatcaaacttggataatccatttatctctttcctagatactgtatatactattatagatcaagagaactatcagactgagttgattaattcattagacgacaatgaaattatcgattgtatagttaataagtttatgagcttttataaggataacctagaaaatatagtagatgctatcattactctaaaatatataatgaataatccagattttaaaactacgtatgccgaagtactcggttccagaatagccgatatagatattaaacaagtgatacgtaagaatatactacaattgtctaataatatccgcgaacgatatttgtgaaaatattaaaaaaaaatactttttttattaaatgacgtcttttcgtgaatttagaaaattatgctgtgctatatatcacgcatcaggatataaagaaaaatctaaattaattagagactttataacagatagggatgataaatatttgatcattaagctattgcttcccggattagacgatagaatttataacatgaacgataaacaaattataaaattatatagtataatatttaaacaatctcaggaagatatgctacaagatttaggatacggatatataggagacactattaggactttcttcaaagagaacacagaaatccgtccacgagataaaagcattttaactttagaagaagtggatagttttttaactacgttatcatccgtaactaaagaatcgcatcaaataaaattattgactgatgtagcatctgtttgtacatgtaatgatttaaaatgtgtagtcatgcttattgataaagatctaaaaattaaagcgggtcctcggtacgtacttaacgctattagtcctaatgcctatgatgtgtttagaaaatctaataacttgaaagagataatagaaaattcatctaaacaaaatctagactctatatctatttctgttatgactccaattaatcccatgttagcggaatcgtgtgattctgtcaataaggcgtttaaaaaatttccatcaggaatgtttgcggaagtcaaatacgatggtgaaagagtacaagttcataaaaataataacgagtttgccttctttagtagaaacatgaaaccagtactctctcataaagtggattatctcaaagaatacataccgaaagcatttaaaaaagctacgtctatcgtattggattctgaaattgttcttgtagacgaacataatgtaccgctcccgtttggaagtttaggtatacacaaaaagaaagaatataaaaactctaacatgtgtttgttcgtgtttgactgtttgtactttgatggattcgatatgacggacattccattgtacgaacgaagatcttttctcaaagatgttatggttgaaatacccaatagaatagtattctcagagttgacgaatattagtaacgagtctcagttaactgacgtattggatgatgcactaacgagaaaattagaaggattggtcttaaaagatattaatggagtatacgaaccgggaaagagaagatggttaaaaataaagcgagactatttgaacgagggttccatggcagattctgccgatttagtagtactaggtgcctactatggtaaaggagcaaagggtggtatcatggcagtctttctaatgggttgttacgacgatgaatccggtaaatggaagacggttaccaagtgttcaggacacgatgataatacgttaagggagttgcaagaccaattaaagatgattaaaattaacaaggatcccaaaaaaattccagagtggttagtagttaataaaatctatattcccgattttgtagtagaggatccgaaacaatctcagatatgggaaatttcaggagcagagtttacatcttccaagtcccataccgcaaatggaatatccattagatttcctagatttactaggataagagaggataaaacgtggaaagaatctactcatctaaacgatttagtaaacttgactaaatcttaatagttacatacaaactgaaaattaaaataacactatttagttggtggtcgccatggatggtgttattgtatactgtctaaacgcgctagtaaaacatggcgaggaaataaatcatataaaaaatgatttcatgattaaaccatgttgtgaaagagtttgtgaaaaagtcaagaacgttcacattggcggacaatctaaaaacaatacagtgattgcagatttgccatatatggataatgcggtatccgatgtatgcaattcactgtataaaaagaatgtatcaagaatatccagatttgctaatttgataaagatagatgacgatgacaagactcctactggtgtatataattattttaaacctaaagatgccattcctgttatcatatctataggaaaggataaagatgtctgtgaactattaatctcatcagacatatcgtgtgcatgcgtggagttaaattcatatcacgtagccattcttcccatggatgtttccttttttaccaaaggaaatgcatcattgattattctcctgtttgatttctctatcgatgcggcacctctcttaagaagtgtaaccgataataatgttattatatctagacaccagcgtctacatgacgagcttccgagttccaattggttcaagttttacataagtataaagtccgactattgttctatattatatatggttgttgatggatctgtgatgcatgcgatagctgataatagaactcacgcaattattagcaaaaatatattagacaatactacgattaacgatgagtgtagatgctgttattttgaaccacagattaggattcttgatagagatgagatgctcaatggatcatcgtgtgatatgaacagacattgtattatgatgaatttacctgatgtaggcgaatttggatctagtatgttggggaaatatgaacctgacatgattaagattgctctttcggtggctggtaatttaataagaaatcgagactacattcccgggagacgaggatatagctactacgtttacggtatagcctctagataatttttttaagcacgaaataaaaaacataattttaaaccaatctatttcatactattttgtgtgatcaccatggacataaagatagatattagtatttctggtgataaatttacggtgactactaggagggaaaatgaagaaagaaaaaaatatctacctctccaaaaagaaaaaactactgatgttatcaaacctgattatcttgagtacgatgacttgttagatagagatgagatgtttactattctagaggaatattttatgtacagaggtctattaggcctcagaataaaatatggacgactctttaacgaaattaaaaaattcgacaatgatgcggaagaacaattcggtactatagaagaactcaagcagaaacttagattaaattctgaagagggagcagataactttatagattatataaaggtacaaaaacaggatatcgtcaaacttactgtatacgattgcatatctatgataggattgtgtgcatgcgtggtagatgtttggagaaatgagaaactgttttctagatggaaatattgtttacgagcgattaaactgtttattgatgatcacatgcttgataagataaaatctatactgcagaatagactagtatatgtggaaatgtcatagaaagttaaaagttaatgagagcaaaaatatataaggttgtattccatatttgttatttttttctgtaatagttagaaaaatacattcgatggtctatctatcagattattatgtgttataaggtactttttctcataataaactagagtatgagtaagatagtgtttttcaaaacatataaatctaaaattgatggatgagatatacagctattaatttcgaaaatatattttaatctgataactttaaacatggatttttaatggtggtttaacgttttaaaaaaagattttgttattgtagtatatgataatattaaaagatggatataaagaatttgctgactgcatgtactattttttacattactacattggctacggcagatatacctacttcgtcactgccacacgctccggtaaacggggcatgtgacgagggagaatatcttgataagaggcataatcaatgttgtaatcagtgtccacctggagaatttgccaaggttagatgtaatggtaacgataacacaaaatgtgaacgctgcccacctcatacatataccgcaatccccaattactctaatggatgtcatcaatgtagaaaatgcccaacaggatcatttgataaggtaaagtgtaccggaacacagaacagtaaatgttcgtgtcttcctggttggtattgcgctactgattcttcacagactgaagattgtcgagattgtataccaaaaaggagatgtccatgcggatactttggtggaatagatgaacaaggaaatcctatttgtaaatcgtgttgtgttggtgaatattgcgactacctacgtaattatagacttgatccatttcctccatgcaaactatctaaatgtaattaattatgattttgatgataatgttaccatacattatatcgctacttggttagtgtattattcagtatgaagacctattaataattacttatcttttgacgatcttgttataattataatataaaaatacttatggcatagtaactcataattgctgacgcgataaattcgtaataatctgttttgttcaaatttttataaggaatctacaggcataaaaataaaaatataatttataatatactcttacagcgcgccatcatgaataacagcagtgaattgattgctgttattaatggatttagaaatagtggacgattttgtgatattaatatagttattaatgatgaaaggataaacgctcacagactcatcctatctggagcctccgaatatttttccattctgttttccaataattttatcgattctaatgaatacgaagttaatctaagtcatttagattatcaaagtgttaacgatttgatcgattacatttatgggatacctttgagcctaactaacgataacgtgaaatatattctttcaaccgctgattttttacaaattggatctgctattacggagtgtgaaaattacatacttaaaaatctttgttctagaaactgtatcgatttctacatatacgctgataaatataataacaagaaaatagaatcagcgtcgtttaacacaatattacaaaatattttgagactcatcaacgatgaaaactttaaatacttaacagaggaatcaatgataaaaattttaagcgatgatatgttaaatataaaaaatgaggatttcgccccactaattctcattaaatggttagagagtactcaacaaccatgcaccgtcgagttacttaaatgcctcagaatatcattgctttccccacaagttataaaatcactttatagtcatcgactggttagttcaatctacgaatgtataacattcttaaacaatatagcattcttggatgaatcatttcctagataccatagcatcgagttgatatctatcggtataagtaattcgcatgataagatttccataaactgctacaatcataaaaaaaatacatgggaaatgatatcttcacgtagatataggtgtagtttcgcagtggccgtcctggataatattatctatatgatgggtggatatgatcagtccccgtatagaagttcaaaggttatagcgtacaatacatgtacaaattcttggatatatgatataccagagctaaaatatcctcgttctaattgtgggggactggctgatgacgaatacatttattgtataggcggcatacgcgatcaggattcatcgttgacatctagtattgatagatggaagccatcaaaaccatattggcagaagtatgctaaaatgcgcgaaccaaaatgtgatatgggggttgcgatgttaaacggattaatatatgttataggtggaatcgttaaaggtgacacgtgtaccgacgcactagagagtttatcagaagatggatggatgaagcatcaacgtcttccaataaaaatgtccaatatgtcgacgattgttcatgatggcaagatttatatatctggaggttacaacaatagtagtgtagttaatgtaatatcgaatctagtccttagctataattcgatatatgatgaatggaccaaattatcatcattaaacattcctagaattaatcccgctctatggtcagcgcataataaattatatgtaggaggaggaatatctgatgatgttcgaactaatacatctgagacatacgacaaagaaaaagattgttggacattggataatggtcacgtgttaccacgcaattatataatgtataaatgcgaaccgattaaacataaatatccattggaaaaaacacagtacacgaatgattttctaaagtatttggaaagttttataggtagttgatagaacaaaatacataattttgtaaaaataaatcactttttatactaatatgacacgattaccaatacttttgttactaatatcattagtatacgctacaccttttcctcagacatctaaaaaaataggtgatgatgcaactctatcatgtaatcgaaataatacaaatgactacgttgttatgagtgcttggtataaggagcccaattccattattcttttagctgctaaaagcgacgtcttgtattttgataattataccaaggataaaatatcttacgactctccatacgatgatctagttacaactatcacaattaaatcattgactgctagagatgccggtacttatgtatgtgcattctttatgacatcaactacaaatgacactgataaagtagattatgaagaatactccacagagttgattgtaaatacagatagtgaatcgactatagacataatactatctggatctacacattcaccggaaactagttctgagaaacctgattatatagataattctaattgctcgtcggtattcgaaatctaagctcaaaaattgaaaaactagcgtctttttttgctcgaagtcgaccaccatggtgggtgaggatagcgtgctgatcaccgagaacatgcacatgaaactgtacatggagggcaccgtgaacgaccaccacttcaagtgcacatccgagggcgaaggcaagccctacgagggcacccagaccatgaagatcaaggtggtcgagggcggccctctccccttcgccttcgacatcctggctaccagcttcatgtacggcagcaaaacctttatcaaccacacccagggcatccccgacttctttaagcagtccttccctgagggcttcacatgggagaggatcaccacatacgaagacgggggcgtgctgaccgctacccaggacaccagcctccagaacggctgcctcatctacaacgtcaagatcaacggggtgaacttcccatccaacggccctgtgatgcagaagaaaacactcggctgggaggccagcaccgagatgctgtaccccgctgacagcggcctgagaggccatagccagatggccctgaagctcgtgggcgggggctacctgcactgctccctcaagaccacatacagatccaagaaacccgctaagaacctcaagatgcccggcttctacttcgtggacaggagactggaaagaatcaaggaggccgacaaagagacctacgtcgagcagcacgagatggctgtggccaggtactgcgacctgcctagcaaactggggcacagctgattaattaatttttatcgatctaattcaacaatgtctggagagcttcgcaggatcccgactccggaaccaattactgataaagaagatcatacagttacagacactgtctcatacactacagtaagtacatcatctggaattgtcactactaaatcaaccaccgatgatgcggatctttatgatacgtacaatgataatgatacagtaccaccaactactgtaggcggtagtacaacctctattagcaattataaaaccaaggactttgtagaaatatttggtattaccgcattaattatattgtcggccgtggcaattttctgtattacatattatatatataataaacgttcacgtaaatacaaaacagagaacaaagtctagatttttgacttacataaatgtctgggatagtaaaatctatcatattgagcggaccatctggtttaggaaagacagccatagccaaaagactatgggaatatatttggatttgtggtgtcccataccactagatttcctcgtcctatggaacgagaaggtgttgattaccattacgttaacagagaggccatctggaagggaatagccgccggaaactttctagaacatactgagtttttaggaaatatttacggaacttctaaaacagctgtgaatacagcggctattaataatcgtatttgtgtgatggatctaaacatcgacggtgttagaagtcttaaaaatacgtacctaatgccttactcggtgtatataagacctacctctcttaaaatggttgagaccaagcttcgtcgtagaaacactgaagctaacgatgagattcatcgtcgtgtgatgttggcaaaaactgacatggatgaggcaggtgaagccggtctattcgacactattatcattgaagatgatgtgaatttagcatatagtaagttaattcagatactacaggaccgtattagaatgtattttaacactaattagagacttaagacttaaaacttgataattaataatataactcgtttttatatgtgtctatttcaacgtctaatgtattagttaaatattaaaacttaccacgtaaaacttaaaatttaaaatgatatttcattgacagatagatcacacattatgaactttcaaggacttgtgttaactgacaattgcaaaaatcaatgggtcgttggaccattaataggaaaaggtggattcggtagtatttatactactaatgacaataattatgtagtaaaaatagagcccaaagctaacggatcattatttaccgaacaggcattttatactagagtacttaaaccatccgttatcgaagaatggaaaaaatctcacaatataaagcacgtaggtcttatcacgtgcaaggcatttggtctatacaaatccattaatgtggaatatcgattcttggtaattaatagattaggtgcagatctagatgcggtgatcagagccaataataatagactaccaaaaaggtcggtgatgttgatcggaatcgaaatcttaaataccatacaatttatgcacgagcaaggatattctcacggagatattaaagcgagtaatatagtcttagatcaaatagataagaataaattatatctagtggattacggattggtttctaaattcatgtctaatggcgaacatgttccatttataagaaatccaaataaaatggataacggtactctagaatttacacctatagattcgcataaaggatacgttgtatctagacgtggagatctagaaacacttggatattgtatgattagatggttgggaggtatcttaccatggactaagatatctgaaacaaagaattgtgcattagtaagtgccacaaaacagaaatatgttaacaatactgcgactttgttaatgaccagtttgcaatatgcacctagagaattgctgcaatatattaccatggtaaactctttgacatattttgaggaacccaattacgacaagtttcggcacatattaatgcagggtgtatattattaagtgtggtgtttggtcgataaaaattaaaaaataacttaatttattattgatctcgtgtgtacaaccgaaatcatggcgatgttttacgcacacgctctcggtgggtacgacgagaatcttcatgcctttcctggaatatcatcgactgttgccaatgatgtcaggaaatattctgttgtgtcagtttataataacaagtatgacattgtaaaagacaaatatatgtggtgttacagtcaggtgaacaagagatatattggagcactgctgcctatgtttgagtgcaatgaatatctacaaattggaaatccgatccatgatcaagaaggaaatcaaatctctatcatcacatatcgccacaaaaactactatgctctaagcggaatcgggtacgagagtctagacttgtgtttggaaggagtagggattcatcatcacgtacttgaaacaggaaacgctgtatatggaaaagttcaacatgattattctactatcaaagagaaggccaaagaaatgagtgcacttagtccaggacctatcatcgattaccacgtctggataggagattgtatctgtcaagttactgctgtggacgtacatggaaaggaaattatgaaaatgagattcaaaaagggtgcggtgcttccgatcccaaatctggtaaaagttaaacttggggagaatgatacagaaaatctttcttctactatatcggcggcaccatcgaggtaaccacctctctggaagacagcgtgaatcatgtactcatgaaacgtttggaaactatacgccatatgtggtctgttgtatatgatcattttgatattgtgaatggtaaagaatgctgttatgtgcatacgcattcatctaatcaaaatcctataccgagtactgtaaaaacaaatttgtacatgaagactatgggatcatgcattcaaatggattccatggaagctctagagtatcttagcgaactgaaggaatcaggtggatggagtcccagaccagaaatgcaggaatttgaatatccagatggagtggaagacactgaatcaattgagagattggcagaggagttcttcaatagatcagaacttcaggctggtgaatcagtcaaatttggtaattctattaattgttaaacatacatctgtttcagctaagcaactaagaacacgtatacggcagcagcttccttctatactctcatcttttaccaacacaaagggtggatatttgttcattggagttgataataatacacacaaagtatttggattcacggtgggttacgactacctcagactgatagagaatgatatagaaaagcatatcaaaagacttcgtgttgtgcatttctgtgagaagaaagaggacatcaagtacgcgtgtcgattcatcaaggtatataaacctggggatgagactacctcgacatacgtgtgcgctatcaaagtggaaagatgctgttgtgctgtgtttgcagattggccagaatcatggtatatggatactaatggtatcaagaagtattctccagatgaatgggtgtcacatataaaattttaattaatgtaactatagagaacaaataataaggttgtaatatcatatagacaataactaacaattaattagtaactgttatctcttttttaactaaccaactaactatatacctattaatacatcgtaattatagttcttaacatctattaatcattaattcgcttctttaattttttataaactaacattgttaattgaaaagggataacatgttacagaatataaattatatatggatttttttaaaaaggaaatacttgactggagtatatatttatctcttcattatatagcacgcgtgttttccaatttttccacatcccatataatacaggattataatctcgttcgaacatacgagaaagtggataaaacaatagttgattttttatctaggttgccaaatttattccatattttagaatatggggaaaatattctacatatttattctatggatgatgctaatacgaatattataattttttttctagatagagtattaaatattaataagaacgggtcatttatacacaatctcgggttatcatcatccattaatataaaagaatatgtatatcaattagttaataatgatcatccagataataggataagactaatgcttgaaaatggacgtagaacaagacattttttgtcctatatatcagatacagttaatatctatatatgtattttaataaatcatggattttatatagatgccgaagacagttacggttgtacattattacatagatgtatatatcactataagaaatcagaatcagaatcatacaatgaattaattaagatattgttaaataatggatcagatgtagataaaaaagatacgtacggaaacacaccttttatcctattatgtaaacacgatatcaacaacgtggaattgtttgagatatgtttagagaatgctaatatagactctgtagactttaatagatatacacctcttcattatgtctcatgtcgtaataaatatgattttgtaaagttattaatttctaaaggagcaaatgttaatgcgcgtaataaattcggaactactccattttattgtggaattatacacggtatctcgcttataaaactatatttggaatcagacacagagttagaaatagataatgaacatatagttcgtcatttaataatttttgatgctgttgaatctttagattatctattatccagaggagttattgatattaactatcgtactatatacaacgaaacatctatttacgacgctgtcagttataatgcgtataatacgttggtctatctattaaacaaaaatggtgattttgagacgattactactagtggatgtacatgtatttcggaagcagtcgcaaacaacaacaaaataataatggaagtactattgtctaaacgaccatctttgaaaattatgatacagtctatgatagcaattactaaacataaacagcataatgcagatttattgaaaatgtgtataaaatatactgcgtgtatgaccgattatgatactcttatagatgtacagtcgctacagcaatataaatggtatattttaagatgtttcgatgaaatagatatcatgaagagatgttatataaaaaataaaactgtattccaattagttttttgtatcaaagacattaatactttaatgagatacggtaaacatccttctttcgtgaaatgcactagtctcgacgtatacggaagtcgtgtacgtaatatcatagcatctattagatatcgtcagagattaattagtctattatccaagaagctggatcctggagataaatggtcgtgttttcctaacgaaataaaatataaaatattggaaaactttaacgataacgaactatccacatatctaaaaatcttataaacattattaaaatataaaatctaagtaggataaaatcacactacatcattgtttccttttagtgctcgacagtgtatactatttttaacgctcataaataaaaatgaaaacgatttccgttgttacgttgttatgcgtactacctgctgttgtttattcaacatgtactgtacccactatgaataacgctaaattaacgtctaccgaaacatcgtttaatgataaccagaaagttacgtttacatgtgatcagggatatcattctttggatccaaatgctgtctgtgaaacagataaatggaaatacgaaaatccatgcaaaaaaatgtgcacagtttctgattatgtctctgaactatataataaaccgctatacgaagtgaattccaccatgacactaagttgcaacggcgaaacaaaatattttcgttgcgaagaaaaaaatggaaatacttcttggaatgatactgttacgtgtcctaatgcggaatgtcaacctcttcaattagaacacggatcgtgtcaaccagttaaagaaaaatactcatttggggaatatatgactatcaactgtgatgttggatatgaggttattggtgcttcgtacataagttgtacagctaattcttggaatgttattccatcatgtcaacaaaaatgtgatatgccgtctctatctaacggattaatttccggatctacattttctatcggtggcgttatacatcttagttgtaaaagtggttttacactaacggggtctccatcatccacatgtatcgacggtaaatggaatcccatactcccaatatgtgtacgaactaacgaaaaatttgatccagtggatgatggtcccgacgatgagacagatttgagcaaactctcgaaagacgttgtacaatatgaacaagaaatagaatcgttagaagcaacttatcatataatcatagtggcgttgacaattatgggcgtcatatttttaatctccgttatagtattagtttgttcctgtgacaaaaataatgaccaatataagttccataaattgctaccgtaaatataaatccgttaaaataattaataatttaataacaaacaagtatcaaaagattaaagacttatagctagaatcaattgagatgtcttcttcagtggatgttgatatctacgatgccgttagagcatttttactcaggcactattataacaagagatttattgtgtatggaagaagtaacgccatattacataatatatacaggctatttacaagatgcgccgttataccgttcgatgatatagtacgtactatgccaaatgaatcacgtgttaaacaatgggtgatggatacacttaatggtataatgatgaatgaacgcgatgtttctgtaagcgttggcaccggaatactattcatggaaatgtttttcgattacaataaaaatagtatcaacaatcaactaatgtatgatataattaatagcgtatctataattctagctaatgagagatatagaagcgcttttaacgacgatggtatatacatccgtagaaatatgattaacaagttgtacggatacgcatctctaactactattggcacgatcgctggaggtgtttgttattatctgttgatgcatctagttagtttgtataaataattatttcaatatactagttaaaattttaagattttaaatgtataaaaaactaataacgtttttatttgtaataggtgcattagcatcctattcgaataatgagtacactccgtttaataaactgagtgtaaaactctatatagatggagtagataatatagaaaattcatatactgatgataataatgaattggtgttaaattttaaagagtacacaatttctattattacagagtcatgcgacgtcggatttgattccatagatatagatgttataaacgactataaaattattgatatgtataccattgactcgtctactattcaacgcagaggtcacacgtgtagaatatctaccaaattatcatgccattatgataagtacccttatattcacaaatatgatggtgatgagcgacaatattctattactgcagagggaaaatgctataaaggaataaaatatgaaataagtatgatcaacgatgatactctattgagaaaacatactcttaaaattggatctacttatatatttgatcgtcatggacatagtaatacatattattcaaaatatgatttttaaaaatttaaaatatattatcacttcagtgacagtagtcaaataacaaacaacaccatgagatatattataattctcgcagttttgttcattaatagtatacatgctaaaataactagttataagtttgaatccgtcaattttgattccaaaattgaatggactggggatggtctatacaatatatcccttaaaaattatggcatcaagacgtggcaaacaatgtatacaaatgtaccagaaggaacatacgacatatccgcatttccaaagaatgatttcgtatctttctgggttaaatttgaacaaggcgattataaagtggaagagtattgtacgggactatgcgtcgaagtaaaaattggaccaccgactgtaacattgactgaatacgacgaccatatcaatttgtacatcgagcatccgtatgctactagaggtagcaaaaagattcctatttacaaacgcggtgacatgtgtgatatctacttgttgtatacggctaacttcacattcggagattctaaagaaccagtaccatatgatatcgatgactacgattgcacgtctacaggttgcagcatagactttgtcacaacagaaaaagtgtgcgtgacagcacagggagccacagaagggtttctcgaaaaaattactccatggagttcgaaagtatgtctgacacctaaaaagagtgtatatacatgcgcaattagatccaaagaagatgttcccaatttcaaggacaaaatggccagagttatcaagagaaaatttaatacacagtctcaatcttatttaactaaatttctcggtagcacatcaaatgatgttaccacttttcttagcatgcttaacttgactaaatattcataactaatttttattaatgatacaaaaacgaaataaaactgcatattatacactggttaacgcccttataggctctaaccattttcaagatgaggtccctgattatagtccttctgttcccctctatcatctactccatgtctattagacgatgtgagaagactgaagaggaaacatggggattgaaaatagggttgtgtataattgccaaagatttctatcccgaaagaactgattgcagtgttcatctcccaactgcaagtgaaggattgataactgaaggcaatggattcagggatatacgaaacaccgataaattataaaaaaagcaatgtgtccgctgtttccgttaataatactattttcgtaactggcggattattcataaataactctaatagcacgatcgtggttaacaatatggaaaaacttgacatttataaagacaaacaatggtcgattatagaaatgcctatggctagggtatatcacggcattgactcgacatttggaatgttatattttgccggaggtctatccgttaccgaacaatatggtaatttagagaaaaacaacgagatatcttgttacaatcctagaacgaataagtggtttgatatttcatatactatttataagatatccatatcatcattgtgtaaactaaataacgtcttctatgtatttagtaaggacattggatatgtggaaaagtatgatggtgcatggaagttagtacatgatcgtctccccgctataaaggcattatcaacttctccttattgattgaaaatgaaaatataaatagtttttatgtatagcagtattaccctatagttttattgcttactactaacatggatacagatgttacaaatgtagaagatatcataaatgaaatagatagagagaaagaagaaatactaaaaaatgtagaaattgaaaataataaaaacattaacaagaatcatcccaatgaatatattagagaagcactcgttattaataccagtagtaatagtgattccattgataaagaagttatagaatgtatcagtcacgatgtaggaatatagatcatatctactaatttttataatcgatacaaaacataaaaaacaactcgttattacatagcaggcatggaatccttcaagtattgttttgataacgatggcaagaaatggattatcggaaatactttatattctggtaattcaatactctataaggtcagaaaaaatttcactagttcgttctacaattacgtaatgaagatagatcacaaatcacacaagccattgttgtctgaaatacgattctatatatctgtattggatcctttgactatcgacaactggacacgggaacgtggtataaagtatttggctattccagatctgtatggaattggagaaaccgatgattatatgttcttcgttataaagaattcgggaagagtattcgccccaaaggatactgaatcagtcttcgaagcatgcgtcactatgataaacacgttagagtttatacactctcgaggatttacccatggaaaaatagaaccgaggaatatactgattagaaataaacgtctttcactaattgactattctagaactaacaaactatacaagagtggaaactcacatatagattacaacgaggacatgataacttcaggaaatatcaattatatgtgtgtagacaatcatcttggagcaacagtttcaagacgaggagatttagaaatgttgggatattgcatgatagaatggttcggtggcaaacttccatggaaaaacgaaagtagtataaaagtaataaaacaaaaaaaagaatataaaaaatttatagctactttctttgaggactgttttcctgaaggaaatgaacctctggaattagttagatatatagaattagtatacacgttagattattctcaaactcctaattatgacagactacgtaaactgtttatacaagattgaaattatattcttttttttatagagtgtggtagtgttacggatatctaatattaatattagactatctctatcgcgctacacgaccaatatcgattactatggatatcttctatgaaaggagagaatgtatttatttctccagcgtcaatctcgtcagtattgacaatactgtattatggagctaatggatccactgctgaacagctatcaaaatatgtagaaacggaggagaacacggataaggttagcgctcagaatatctcattcaaatccatgaataaagtatatgggcgatattctgccgtgtttaaagattcctttttgagaaaaattggcgataagtttcaaactgttgacttcactgattgtcgcactatagatgcaatcaacaagtgtgtagatatctttactgaggggaaaatcaatccactattggatgaaccattgtctcctagcaattagtgccgtatactttaaagcaaaatggttgacgccattcgaaaaggaatttaccagtgattatcccttttacgtatctccgacggaaatggtagacgtaagtatgatgtctatgtacggcaaggcatttaatcacgcatctgtaaaagaatcattcggcaacttttcaatcatagaactgccatatgttggagatactagtatgatggtcattcttccagacaagattgatggattagaatccatagaacaaaatctaacagatacaaattttaagaaatggtgtgactttatggatgctatgtttatagatgttcacattcccaagtttaaggtaacaggctcgtataatctggtggatactctagtaaagtcaggactgacagaggtgttcggttcaactggagattatagcaatatgtgtaatttagatgtgagtgtcgacgctatgatccacaaaacgtatatagatgtcaatgaagagtatacagaagcagctgcagcaacttctgtactagtggcagactgtgcatcaacaattacaaatgagttctgtgcagatcatccgttcatctatgtgattaggcatgttgatggaaaaattcttttcgttggtagatattgctctccgacaactaattgttaaccattttttttaaaaaaaatagaaaaaacatgtggtattagtgcaggtcgttgttcttccaattgcaattggtaagatgacggccaactttagtacccacgtcttttcaccacagcactgtggatgtgacagactgaccagtattgatgacgtcaaacaatgtttgactgaatatatttattggtcgtcctatgcataccgcaacaggcaatgcgctggacaattgtattccacactcctctcttttagagatgatgcggaattagtgttcatcgacattcgcgagctggtaaaaaatatgccgtgggatgatgtcaaagattgtacagaaatcatccgttgttatataccggatgagcaaaaaaccatcagagagatttcggccatcatcggactttgtgcatatgctgctacttactggggaggtgaagaccatcccactagtaacagtctgaacgcattgtttgtgatgcttgagatgctaaattacgtggattataacatcatattccggcgtatgaattgatgagttgtacatcttgacattttctttcttctcttctccctttcttctcttctcccttcctccctcttctccctttcccagaaacaaacttttttacccactataaaataaaatgagtatactacctattatatttcttcctatatttttttattcttcattcgttcagacttttaacgcgtctgaatgtatcgacaaagggcaatattttgcatcattcatggagttagaaaacgagccagtaatcttaccatgtcctcaaataaatacgctatcatccggatataatatattagatattttatgggaaaaacgaggagcggataatgatagaattataccgatagataatggtagcaatatgctaattctgaacccgacacaatcagactctggtatttatatatgcattaccacgaacgaaacctactgtgacatgatgtcgttaaatttgacaatcgtgtctgtctcagaatcaaatatagatcttatctcgtatccacaaatagtaaatgagagatctactggcgaaatggtatgtcccaatattaatgcatttattgctagtaacgtaaacgcagatattatatggagcggacatcgacgccttagaaataagagacttaaacaacggacacctggaattattaccatagaagatgttagaaaaaatgatgctggttattatacatgtgttttagaatatatatacggtggcaaaacatataacgtaaccagaattgtaaaattagaggtacgggatagaataataccttctactatgcaattaccagatggcattgtaacttcaataggtagtaatttgactattgcatgcagagtatcgttgagacctcccacaacggacaccgacgtcttttggataagtaatggtatgtattacgaagaagatgatggggacggaaacggtagaataagtgtagcaaataaaatctatatgaccgataagagacgtgttattacatcccggttaaacattaatcctgtcaaggaagaagatgctacaacgtttacgtgtatggcgtttactattcctagcatcagcaaaacagttactgttagtataacgtgaatgtatgttgttacatttccatgtcaattgagtttataagaatttttatacattatcttccaacaaacaattgacgaacgtattgctatgattaactcccacgatactatgcatattattaatcattaacttgcagactatacctagtgctattttgacatactcgtgttcttgtgtaattgcggtatctatattattaaagtacgtaaatctagctatagttttattatttaattttagataatataccgtctccttatttttaaaaattgccacatcctttattaaatcatgaatgggaatttctatgtcatcgttagtatattgtgaacaacaagagcagatatctataggaaagggtggaatgcgatacattgatctatgtagttttaaaacacacgcgaactttgaagaatttatataaatcattccatcgatacatccttctatgttgacatgtatatatccaggaattcttttattaatgtcaggaaatgtataaactaaaacattgcccgaaagcggtgcctctatctgcgttatatccgttcttaacttacaaaatgtaaccaatacctttgcatgacttgttttgttcggcaacgttagtttaaacttgacgaatggattaattacaatagcatgatccgcgcatctattaagtttttttactttaacgcccttgtatgtttttacagagactttatctaaatttctagtgcttgtatgtgttataaatataacgggatatagaaccgaatcacctaccttagatacccaattacattttatcagatccagataataaacaaattttgtcgccctaactaattctatattgttatatattttacaattggttatgatatcatgtaataacttggagtctaacgcgcatcgtcgtacgtttatacaattgtgatttagtgtagtatatctacacatgtatttttccgcactatagtattctggactagtgataaaactatcgttatatctgtcttcaatgaactcatcgagatattgctctctgtcatattcatacacctgcataaactttctagacatcttacaatccgtgttattttaggatcatatttacatatttacgggtatatcaaagatgttagattagttaatgggaatcgtctataataatgaatattaaacaattatatgaggacttttaccacaaagcatcataaaaatgagtcgtcgtctgatttatgttttaaatatcaaccgcaaatcaactcataaaatacaagagaatgaaatatatacatattttagtcattgcaatatagaccatacttctacagaacttgattttgtagttaaaaactatgatctaaacagacgacaacctgtaactgggtatactgcactacactgctatttgtataataattactttacaaacgatgtactgaagatattattaaatcatgacgtaaatgtaacgatgaaaaccagtagcggacgtatgcctgtttatatattgcttactagatgttgtaatatttcacatgatgtagtgatagatatgatagacaaagataaaaaccacttattacatagagactattccaacctattactagagtatataaaatctcgttacatgttattgaaggaagaggatatcgatgagaacatagtatccactttattagataagggaatcgatcctaactttaaacaagacggatatacagcgttacattattattatttgtgtctcgcacacgtttataaactaggtgagtgtagaaaaccgataacgataaaaaaggccaagcgaattatttctttgtttatacaacatggagctaatctaaacgcgttagataattgtggtaatacaccattccatttgtatcttagtattgaaatgtgtaataatattcatatgactaaaatgctgttgacttttaatccgaatttcaaaatatgtaataatcatggattaacgcctatactatgttatataacttccgactacatacaacacgatattcttgttatgttaatacatcactatgaaacaaatgttggagaaatgccgatagatgagcgtcgtatgatcgtattcgagtttatcaaaacatattctacacgtccggcagattcgataacttatttgatgaataggtttaaaaatataaatatttatacccgctatgaaggaaagacattattacacgtagcatgtgaatataataatacacaagtaatagattatcttatacgtatcaacggagatataaatgcgttaaccgacaataacaaacacgctacacaactcattatagataacaaagaaaattccccatataccattaattgtttactgtatatacttagatatattgtagataagaatgtgataagatcgttggtggatcaacttccatctctacctatcttcgatataaaatcatttgagaaattcatatcctactgtatacttttagatgacacattttacgataggcacgttaagaatcgcgattctaaaacgtatcgatacgcattttcaaaatacatgtcgtttgataaatacgatggtataataactaaatgtcacgacgaaacaatgttactcaaactgtccactgttctagacactacactatatgcagttttaagatgtcataattcgagaaagttaagaagatacctcaacgagttaaaaaaatataataacgataagtcctttaaaatatattctaatattatgaatgagagataccttaatgtatattataaagatatgtacgtgtcaaaggtatatgataaactatttcctgttttcacagataaaaattgtctactaacattactaccttcagaaattatatacgaaatattatacatgctgacaattaacgatctttataatatatcgtatccacctaccaaagtatagttgtatttttctcatgcgatgtgtgtaaaaaaactgatattatataaatattttagtgccgtataataaagatgacgatgaaaatgatggtacatatatatttcgtatcattattgttattgctattccacagttacgccatagacatcgaaaatgaaatcacagaattcttcaataaaatgagagatactctaccagctaaagactctaaatggttgaatccagcatgtatgttcggaggcacaatgaatgatatagccgctctaggagagccattcagcgcaaagtgtcctcctattgaagacagtcttttatcgcacagatataaagactatgtggttaaatgggagaggctagaaaagaatagacggcgacaggtttctaataaacgtgttaaacatggtgatttatggatagccaactatacatctaaattcagtaaccgtaggtatttgtgcaccgtaactacaaagaatggtgactgtgttcagggtatagttagatctcatattaaaaaacctccttcatgcattccaaaaacatatgaactaggtactcatgataagtatggcatagacttatactgtggaattctttacgcaaaacattataataatataacttggtataaagataataaggaaattaatatcgacgacattaagtattcacaaacgggaaaggaattaattattcataatccagagttagaagatagcggaagatacgactgttacgttcattacgacgacgttagaatcaagaatgatatcgtagtatcaagatgtaaaatacttacggttataccgtcacaagaccacaggtttaaactaatactagatccgaaaatcaacgtaacgataggagaacctgccaatataacatgcactgctgtgtcaacgtcattattgatcgacgatgtactgattgaatgggaaaatccatccggatggcttataggattcgattttgatgtatactctgttttaactagtagaggcggtatcaccgaggcgaccttgtactttgaaaatgttactgaagaatatataggtaatacatataaatgtcgtggacacaactattattttgaaaaaacccttacaactacagtagtattggagtaaatatacaatgcatttttatatacattactgaattattattactgaattattattactgaattattattaattatatcgtatttgtgctatagaatggatgaagatacgcgactatctaggtatttgtatctcaccgatagagaacatataaatgtagactctattaaacagttgtgtaaaatatcagatcctaatgcatgttatagatgtggatgtacggctttacatgagtacttttataattatagatcagtcaacggaaaatacaagtatagatacaacggttactatcaatattattcatctagcgattatgaaaattataatgaatattattatgatagaactggtatgaacagtgagagtgataatatatcaatcaaaacagaatatgaattctatgatgaaacacaagatcaaagtacacaactagtaggttacgacattaaactcaaaaccaatgaggatgattttatggctatgatagatcagtgggtgtccatgattatatagatgaatcaattaataaagtagtatatggaagagagtctcacgtaagatggcgggatatatggcaagaacataatgatggcgtatacagtataggaaaggagtgcatagataatatatacgaagacaaccataccgtagacgaattctacaagatagacagcgtatcagatgtagatgacgcggaacacatatctccgataactaaaaaaccatagaatcagttgatgataatacctacatttctaatcttccgtataccatcaaatacaaaatattcgagcaacaataagtattttttatacctttaaaactgataaataaattttttctagtgatattttggcaagatgagaatcctatttctcatcgctttcatgtatgggtgtgttcactcatatgttaacgcggttgaaaccaaatgtccaaatctagacattgtaacatcttctggagaatttcattgttcaggatgtgtggaacatatgcctgagtttagctatatgtattggttggcaaaggatatgaaatcggacgaggataccaagtttatagaacatctgggtgatggcatcaaagaagatgaaaccgttcgtaccacagatagtggaatcgtcactctacgtaaagtccttcatgtgactgatactaataaatttgataattataggttcacttgtgtcctcgctacgctagatggcatttataaaaagaatgtttgctgaagtagttgtgtgctactatttttatttatgatataatctaatggaattaatttgaattgatatttatccaatactaaagattatattagaatcaaattaatcttttatacgagaaaaaataacgacatacgtcgtcaacaaattaaactttttatttattagttaactagcttatagaacttgctcattgttatgtttctaaaacgggtacggcatataggacaattatccgacgcaccggtttctcttcgtgttctatgccatatattgatgcatgttatgcaaaatatatgagtacacgaatccaataaaccaaagtatctatcgttttgagtaaacaacttcatagcaaattccacattctttttctttacttactctatacacgtcctcgtatttatttagtattttgatgatatccaactcagaaatggttgttgtattattgggtgtatttggagtataggtattattagctatgtaccaatttaccaaccctcttaatattgattgataatcacatcggttatccaattaataactaaattgtagtgtatatatagaccatatatgtttctatttttttgacagttacgtatagtttcagtaagttttgattgttgtattcctgtatctctagataagttagtcatatagtcccttccggcgatacgttttttccaagcccgaaattgattagccaaatgtgtatttatttttgtgatattgatataatatttcggataatgcatactgttagtcttatatcatttggttcatctatgtattgtaatattgttacatgatctatagatgatgtattgattttggcaggatcgaattccatatccgcgactaaacagtgaaaaaaatgtaaatactttttaaattttaaattagtaaaacttttttttattttttatgattccaaaaatactgaatacaaagtcctaaattataaatatggagatcatactaccacaacttattattatgtatacaaggccggtgtaatagatagatatatataattctattacaccggcagacaattaccgaccggtatttgtcgttaccaacataccgtataatatgtaatatacaattccataacccattgacagttgttatacatcaaaattgcaattcttttgattacgatgttataagaatgtagttaattgatgtatgatgttaatgtgtcctctttcctcttataacatcgtaatcaaaaacttttttataatatatacctaataatgtgtcttaatagttctcgtgattcgtcaaacaatcattcttataaaatataataaagcaacgtaaaaacacataaaaataagcgtaactaataagacaatggatatttacgacgataaaggtctacagactattaaactgtttaataatgaatttgattgtataaggaatgacatcagagaattatttaaacatgtaactgattccgatagtatacaacttccgatggaagacaattctgatattatagaaaatatcagaaaaatactatatagacgattaaaaaatgtagaatgtgttgacatcgataacacaataacttttatgaaatacgatccaaatgatgataataagcgtacgtgttctaattgggtacccttaactaataactatatggaatattgtctagtaatatatttggaaacaccgatatgtggaggcaaaataaaattataccaccctacaggaaatataaagtcggataaggatattatgtttgcaaagactctagactttaaatcaacgaaagtgttaactggacgtaaaacaattgccgttctagacatatccgtttcatataatagatcaatgactactattcactacaacgacgacgttgatatagatatacatactgataaaaatggaaaagagttatgttattgttatataacaatagatgatcattacttggttgatgtggaaactataggagttatagtcaatagatctggaaaatgtctgttagtaaataaccatctaggtataggtatcgttaaagataaacgtataagcgatagttttggagatgtatgtatggatacaatatttgacttttctgaagcacgagagttattttcattaactaatgatgataacaggaatatagcatgggacactgataaactagacgatgatacagatatatggactcccgtcacagaagatgattacaaatttctttctagactagtattgtatgcaaaatctcaatcggatactgtatttgactattatgttcttactggtgatacggaaccacccactgtattcattttcaaggtaactagattttactttaatatgccgaaataaaaaatttttgtataatatctagaggtagaggtattgtttagataaatacaaataacatagatacatcgcatacttagcatttttataaatatacataagacatacactttatacatttttgtaaaaatactcataaaaaaatttataaaaattatggcacaaccatatcttgtataggtagtttagttcgtcgagtgaacctataaacagataatagacaacacataataatgcctactaatacaagcataataccgggagatgggatatatgacgttgtagtgtttgggttttctgaacgttgatagtctactaatactacatgctgacatctaatgcctgtataaccatgagagcatctacaatacataccgtcaatatctctagcgtggatacagtcaccgtgtaaacaatatccatctccctctggaccgcataatctgatagctggaatatctgttgtagcgtttgtaatttctggcaatgtcgtttcgatagcgttaccactatcggcgaatgatctgattatcatagcagcgaacaacaacatcagataatttatcaacatttttgatggattctgtgtttatgctgtttctcagtgtgtgtttatgacaagattgggaattttatattattaattcagtaatataaactaataatatattgttaattgtgtaaataatataaaaataacaatacaatattgaatgtgttgctgttaaaaatgtatgtgttaatataatagaataaaataaatgagtatgatcattttagataacgattgattttatcattaccgcttcattcttatattctttgcttacggaacctatatttagaaacatctactaacaattttttatgcttgcattattaatggtatgtaatatgattgattgtgtacgcaataccaatttgttaagtatgaatacggggtacaaacataaattgaaatttaacattatttatttatgatatatatcgttatcgttaggtctataccatggatatctttaaagaactaatcttaaaacaccctgatgaaaatgttttgatttctccagtttccattttatctactttatctattctaaatcatggagcagctggttctacagctgaacaactatcaaaatatatagagaatatgaatgagaatacacccgatgacaataatgatgacatggaggtagatattccgtattgtgcgacactagctaccgcaaataaaatatacggtagcgatagtatcgagttccacgcctccttcctacaaaaaataaaagacgattttcaaactgtaaactttaataatgctaaccaaacaaaggaactaatcaacgaatgggttaagacaatgacaaatggtaaaattaattccttattgactagtccgctatccattaatactcgtatgacagttgttagcgccgtccattttaaagcaatgtggaaatatccattttctaaacatcttacatatacagacaagttttatatttctaagaatatagttaccagcgttgatatgatggtgggtaccgagaataacttgcaatatgtacatattaatgaattattcggaggattctctattatcgatattccatacgagggaaactctagtatggtaattatactaccggacgacatagaaggtatatataacatagaaaaaaatataacagatgaaaaatttaaaaaatggtgtggtatgttatctactaaaagtatagacttgtatatgccaaagtttaaagtggaaatgacagaaccgtataatctggtaccgattttagaaaatttaggacttactaatatattcggatattatgcagattttagcaagatgtgtaatgaaactatcactgtagaaaaatttctacatacgacgtttatagatgttaatgaggagtatacagaagcatcggccgttacaggagtatttacgattaacttttcgatggtatatcgtacgaaggtctacataaaccatccattcatgtacatgattaaagacaccacaggacgtatactttttatagggaaatactgctatccgcaataaatataaacaaatagacttttataaagagtcttcaacgataagtatatcgacatactacttatgctgcgaaagattctgaacgagaacgactatctcaccctcttggatcatatccgcactgctaaatactaaatctccactacactttttatcatcttatgaggaatgattgccttcgtgaaataggaataattagcaccagaatagctatggattattgtggtagagagtgcactattctatgtcgtctactggatgaagatgtgacgtacaaaaaaataaaactagaaattgaaacgtgtcacaacttatcaaaacatatagatagacgaggaaacaatgcgctacattgttacgtctccaataaatgcgatacagacattaagattgttctctcgcggagtcgagagactttgtagaaacaacgaaggattaactccgctaggagtatacagtaagcatagatacgtaaaatctcagattgtgcatctactgatatccagctattcaaattcctctaacgaactcaagtcgaatataaatgatttcgatctgtattcggataatatcgacttacgtctgctaaaatacctaattgtggataaacggatacgtccgtccaagaatacgaattatgcaatcaatggtctcggattggtggatatatacgtaacgacgcctaatccgagaccagaagtattgctatggcttcttaaatcagaatgttacagcaccggttacgtatttcgtacctgtatgtacgacagtgatatgtgtaagaactctcttcattactatatatcgtctcatagagaatctcaatctctatccaaggatgtaattaaatgtttgatcgataacaatgtttccatccatggcagagacgaaggaggatctttacccatccaatactactggtctttctcaaccatagatatagagattgttaaattattattaataaaggatgtggacacgtgtagagtatacgacgtcagccctatattagaggcgtattatctaaacaagcgatttagagtaaccccatataatgtagacatggaaatcgttaatcttcttattgagagacgtcatactcttgtcgacgtaatgcgtagtattacttcgtacgattccagagaatataaccactacatcatcgataacattctaaagagatttagacaacaggatgaatccatcgtacaagccatactgataaactacttacattacggcgatatggtcgttcgatgcatgttagataacggacaacaactatcctctacacgactactttgttaataataatctcgtcgatgtaaacgtcgtaaggtttatcgtggaaaatatggacacgcggctgtaaatcacgtatcgaacaatggccgtctatgtatgtacggtctgatattatcgagatttaataattgcgggtatcactgttatgaaaccatactgatagatgtatttgatatactaagcaagtacatggatgatatagatatgatcgataactctactatattacgcggtcgatgtcaataatatacaatttgcaaagcggttattggaatatggagcgagtatcacgctcgataatcaatacggccatccagaaaagcagttacagaagagaaaacaaaacgaaatcgttgttctacaagatgtctctccctacgacgattactacgtaaaaaagatactagcctactgcctattaagggacgagtcattcgcggaactacatagtaaattctgtttaaacgaggactataaaagtgtatttatgaaaaatatatcattcgataagatagattccatcatcgtgacataagtcgcctcaaagagattcgaatctccgacaccgacctgtatacggtatcacagctatcttaaagccatacattcagacagtcacatttcatttcccatgtacgacgatctcatagaacagtgccatctatcgatggagcgtaaaagtaaactcgtcgacaaagcactcaataaattagagtctaccatcggtcaatctagactatcgtatttgcctccggaaattatgcgcaatatcatctaaacagtatgttgtacggaaagaaccattacaaatattatccatgatagaaagaaaatatctatatgattggagaagtaggaaacaggaacaagacaacgattactacattattaaatcatgaagtccgtattatactcgtatatattgtttctctcatgtataataataaacggaagagatatagcaccgcatgcaccatccgatggaaagtgtaaagacaacgaatacaaacgccataatttgtgtccgggaacatacgcttccagattatgcgatagcaagactaacacacgatgtacgccgtgtggttcgggtaccttcacatctcgcaataatcatttacccgcttgtctaagttgtaacggaagacgcgatcgtgtaacacgactcacaatagaatctgtgaatgctctcccggatattattgtcttctcaaaggatcatccggatgcaaggcatgtgtttcccaaacaaaatgtggaataggatacggagtatccggagacgtcatctgttctccgtgtggtctcggaacatattctcacaccgtctcttccgcagataaatgcgaacccgtacccagaaatacgtttaactatatcgatgtggaaattaacctgtatccagttaacgacacgtcgtgtactcggacgaccactaccggtctcagcgaatccatctcaacgtcggaactaactattactatgaatcataaagactgtaatcccgtatttcgtgatggatacttctccgttcttaataaggtagcgacttcaggtttctttacaggagaaaggtgtgcactctgaatttcgagattaaatgcaataacaaagattcttcctccaaacagttaacgaaagcaaagaatgatactatcatgccgcattcggagacagtaactctagtgggcgacatctatatactatatagtaataccaatactcaagactacgaaactgatacaatctcttatcatgtgggtaatgttctcgatgtcgatagccatatgcccggtagttgcgatatacataaactgatcactaattccaaacccacccactttttatagtaagtttttcacccataaataataaatacaataattaatttctcgtaaaagtagaaaatatattctaatttattgcacggtaaggaagtagaatcataaagaacagtactcaatcaatagcaattatgaaacaatatatcgtcctggcatgcatgtgcctggcggcagctgctatgcctgccagtcttcagcaatcatcctcatcctcctcctcgtgtacggaagaagaaaacaaacatcatatgggaatcgatgttattatcaaagtcacaaagcaagaccaaacaccgaccaatgataagatttgccaatccgtaacggaaattacagagtccgagtcagatccagatcccgaggtggaatcagaagatgattccacatcagtcgaggatgtagatcctcctaccacttattactccatcatcggtggaggtctgagaatgaactttggattcaccaaatgtcctcagattaaatccatctcagaatccgctgatggaaacacagtgaatgctagattgtccagcgtgtccccaggacaaggtaaggactctcccgcgatcactcatgaagaagctcttgctatgatcaaagactgtgaagtgtctatcgacatcagatgtagcgaagaagagaaagacagcgacatcaagacccatccagtactcgggtctaacatctctcataagaaagtgagttacgaagatatcatcggttcaacgatcgtcgatacaaaatgcgtcaagaatctagagtttagcgttcgtatcggagacatgtgcaaggaatcatctgaacttgaggtcaaggatggattcaagtatgtcgacggatcggcatctgaaggtgcaaccgatgatacttcactcatcgattcaacaaaactcaaagcgtgtgtctgaatcgataactctattcatctgaaattggatgagtagggttaatcgaacgattcaggcacaccacgaattaaaaaagtgtaccggacactatattccggtttgcaaaacaaaaatgttcttaactacattcacaaaaagttacctctcgcgacttcttctttttctgtctcaatagtgtgatacgattatgacactattcctattcctattcctatttcctttcagagtatcacaaaaatattaaacctctttctgatggtctcataaaaaaagttttacaaaaatatttttattctctttctctctttgatggtctcataaaaaaagttttacaaaaatatttttattctctttctctctttgatggtctcataaaaaaagttttacaaaaatatttttattctctttctctctttgatggtctcataaaaaaagttttacaaaaatatttttattctctttctctctttgatggtctcataaaaaaagttttacaaaaatatttttattctctttctctctttgatggtctcataaaaaaagttttacaaaaatatttttattctctttctctctttgatggtctcataaaaaaagttttacaaaaatatttttattctctttctctctttgatggtctcataaaaaaagttttacaaaaatatttttattctctttctctctttgatggtctcataaaaaaagttttacaaaaatatttttattctctttctctctttgatggtctcataaaaaaagttttacaaaaatatttttattctctttctctctttgatggtctcataaaaaaagttttacaaaaatatttttattctctttctctctttgatggtctcataaaaaaagttttacaaaaatatttttattctctttctctctttgatggtctcataaaaaagttttacaaaaatatttttattctctttctctctttgatggtctcataaaaaagttttacaaaaatatttttattctctttctctctttgatggtctcataaaaaaagttttacaaaaatatttttattctctttctctctttgatggtctcataa

SEQ ID NO: 7 - DNA, 199502 bp, Artificial Sequence
  GLV-1h254 genome
ttatgagaccatcaaagagagaaagagaataaaaatatttttgtaaaactttttttatgagaccatcaaagagagaaagagaataaaaatatttttgtaaaacttttttatgagaccatcaaagagagaaagagaataaaaatatttttgtaaaacttttttatgagaccatcaaagagagaaagagaataaaaatatttttgtaaaactttttttatgagaccatcaaagagagaaagagaataaaaatatttttgtaaaactttttttatgagaccatcaaagagagaaagagaataaaaatatttttgtaaaactttttttatgagaccatcaaagagagaaagagaataaaaatatttttgtaaaactttttttatgagaccatcaaagagagaaagagaataaaaatatttttgtaaaactttttttatgagaccatcaaagagagaaagagaataaaaatatttttgtaaaactttttttatgagaccatcaaagagagaaagagaataaaaatatttttgtaaaactttttttatgagaccatcaaagagagaaagagaataaaaatatttttgtaaaactttttttatgagaccatcaaagagagaaagagaataaaaatatttttgtaaaactttttttatgagaccatcaaagagagaaagagaataaaaatatttttgtaaaactttttttatgagaccatcaaagagagaaagagaataaaaatatttttgtaaaactttttttatgagaccatcaaagagagaaagagaataaaaatatttttgtaaaactttttttatgagaccatcagaaagaggtttaatatttttgtgatactctgaaaggaaataggaataggaataggaatagtgtcataatcgtatcacactattgagacagaaaaagaagaagtcgcgagaggtaactttttgtgaatgtagttaagaacatttttgttttgcaaaccggaatatagtgtccggtacacttttttaattcgtggtgtgcctgaatcgttcgattaaccctactcatccaatttcagatgaatagagttatcgattcagacacacgctttgagttttgttgaatcgatgagtgaagtatcatcggttgcaccttcagatgccgatccgtcgacatacttgaatccatccttgacctcaagttcagatgattccttgcacatgtctccgatacgaacgctaaactctagattcttgacgcattttgtatcgacgatcgttgaaccgatgatatcttcgtaactcactttcttatgagagatgttagacccgagtactggatgggtcttgatgtcgctgtctttctcttcttcgctacatctgatgtcgatagacacttcacagtctttgatcatagcaagagcttcttcatgagtgatcgcgggagagtccttaccttgtcctggggacacgctggacaatctagcattcactgtgtttccatcagcggattctgagatggatttaatctgaggacatttggtgaatccaaagttcattctcagacctccaccgatgatggagtaataagtggtaggaggatctacatcctcgactgatgtggaatcatcttctgattccacctcgggatctggatctgactcggactctgtaatttccgttacggattggcaaatcttatcattggtcggtgtttggtcttgctttgtgactttgataataacatcgattcccatatgatgtttgttttcttcttccgtacacgaggaggaggatgaggatgattgctgaagactggcaggcatagcagctgccgccaggcacatgcatgccaggacgatatattgtttcataattgctattgattgagtactgttctttatgattctacttccttaccgtgcaataaattagaatatattttctacttttacgagaaattaattattgtatttattatttatgggtgaaaaacttactataaaaagtgggtgggtttggaattagtgatcagtttatgtatatcgcaactaccgggcatatggctatcgacatcgagaacattacccacatgataagagattgtatcagtttcgtagtcttgagtattggtattactatatagtatatagatgtcgcccactagagttactgtctccgaatgcggcatgatagtatcattctttgctttcgttaactgtttggaggaagaatctttgttattgcatttaatctcgaaattcagagtgcacacctttctcctgtaaagaaacctgaagtcgctaccttattaagaacggagaagtatccatcacgaaatacgggattacagtctttatgattcatagtaatagttagttccgacgttgagatggattcgctgagaccggtagtggtcgtccgagtacacgacgtgtcgttaactggatacaggttaatttccacatcgatatagttaaacgtatttctgggtacgggttcgcatttatctgcggaagagacggtgtgagaatatgttccgagaccacacggagaacagatgacgtctccggatactccgtatcctattccacattttgtttgggaaacacatgccttgcatccggatgatcctttgagaagacaataatatccgggagagcattcacagattctattgtgagtcgtgttacacgatcgcgtcttccgttacaacttagacaagcgggtaaatgattattgcgagatgtgaaggtacccgaaccacacggcgtacatcgtgtgttagtcttgctatcgcataatctggaagcgtatgttcccggacacaaattatggcgtttgtattcgttgtctttacactttccatcggatggtgcatgcggtgctatatctcttccgtttattattatacatgagagaaacaatatatacgagtataatacggacttcatgatttaataatgtagtaatcgttgtcttgttcctgtttcctacttctccaatcatatagatattttctttctatcatggataatatttgtaatggttctttccgtacaacatactgtttagatgatattgcgcataatttccggaggcaaatacgatagtctagattgaccgatggtagactctaatttattgagtgctttgtcgacgagtttacttttacgctccatcgatagatggcactgttctatgagatcgtcgtacatgggaaatgaaatgtgactgtctgaatgtatggctttaagatagctgtgataccgtatacaggtcggtgtcggagattcgaatctctttgaggcgacttatgtcacgatgatggaatctatcttatcgaatgatatatttttcataaatacacttttatagtcctcgtttaaacagaatttactatgtagttccgcgaatgactcgtcccttaataggcagtaggctagtatcttttttacgtagtaatcgtcgtagggagagacatcttgtagaacaacgatttcgttttgttttctcttctgtaactgcttttctggatggccgtattgattatcgagcgtgatactcgctccatattccaataaccgctttgcaaattgtatattattgacatcgaccgcgtaatatagtagagttatcgatcatatctatatcatccatgtacttgcttagtatatcaaatacatctatcagtatggtttcataacagtgatacccgcaattattaaatctcgataatatcagaccgtacatacatagacggccattgttcgatacgtgatttacagccgcgtgtccatattttccacgataaaccttacgacgtttacatcgacgagattattattaacaaagtagtcgtgtagaggatagttgttgtccgttatctaacatgcatcgaacgaccatatcgccgtaatgtaagtagtttatcagtatggcttgtacgatggattcatcctgttgtctaaatctctttagaatgttatcgatgatgtagtggttatattctctggaatcgtacgaagtaatactacgcattacgtcgacaagagtatgacgtctctcaataagaagattaacgatttccatgtctacattatatggggttactctaaatcgcttgtttagataatacgcctctaatatagggctgacgtcgtatactctacacgtgtccacatcctttattaataataatttaacaatctctatatctatggttgagaaagaccagtagtattggatgggtaaagatcctccttcgtctctgccatggatggaaacattgttatcgatcaaacatttaattacatccttggatagagattgagattctctatgagacgatatatagtaatgaagagagttcttacacatatcactgtcgtacatacaggtacgaaatacgtaaccggtgctgtaacattctgatttaagaagccatagcaatacttctggtctcggattaggcgtcgttacgtatatatccaccaatccgagaccattgattgcataattcgtattcttggacggacgtatccgtttatccacaattaggtattttagcagacgtaagtcgatattatccgaatacagatcgaaatcatttatattcgacttgagttcgttagaggaatttgaatagctggatatcagtagatgcacaatctgagattttacgtatctatgcttactgtatactcctagcggagttaatccttcgttgtttctacaaagtctctcgactccgcgagagaacaatcttaatgtctgtatcgcatttattggagacgtaacaatgtagcgcattgtttcctcgtctatctatatgttttgataagttgtgacacgtttcaatttctagttttatttttttgtacgtcacatcttcatccagtagacgacatagaatagtgcactctctaccacaataatccatagctattctggtgctaattattcctatttcacgaaggcaatcattcctcataagatgataaaaagtgtagtggagatttagtatttagcagtgcggatatgatccaagagggtgagatagtcgttctcgttcagaatctttcgcagcataagtagtatgtcgatatacttatcgttgaagactctttataaaagtctatttgtttatatttattgcggatagcagtatttccctataaaaagtatacgtcctgtggtgtctttaatcatgtacatgaatggatggtttatgtagaccttcgtacgatataccatcgaaaagttaatcgtaaatactcctgtaacggccgatgcttctgtatactcctcattaacatctataaacgtcgtatgtagaaatttttctacagtgatagtttcattacacatcttgctaaaatctgcataatatccgaatatattagtaagtcctaaattttctaaaatcggtaccagattatacggttctgtcatttccactttaaactttggcatatacaagtctatacttttagtagataacataccacaccattttttaaatttttcatctgttatatttttttctatgttatatataccttctatgtcgtccggtagtataattaccatactagagtttccctcgtatggaatatcgataatagagaatcctccgaataattcattaatatgtacatattgcaagttattctcggtacccaccatcatatcaacgctggtaactatattcttagaaatataaaacttgtctgtatatgtaagatgtttagaaaatggatatttccacattgctttaaaatggacggcgctaacaactgtcatacgagtattaatggatagcggactagtcaataaggaattaattttaccatttgtcattgtcttaacccattcgttgattagttcctttgtttggttagcattattaaagtttacagtttgaaaatcgtcttttattttttgtaggaaggaggcgtggaactcgatactatcgctaccgtatattttatttgcggtagctagtgtcgcacaatacggaatatctacctccatgtcatcattattgtcatcgggtgtattctcattcatattctctatatattttgatagttgttcagctgtagaaccagctgctccatgatttagaatagataaagtagataaaatggaaactggagaaatcaaaacattttcatcagggtgttttaagattagttctttaaagatatccatggtatagacctaacgataacgatatatatcataaataaataatgttaaatttcaatttatgtttgtaccccgtattcatacttaacaaattggtattgcgtacacaatcaatcatattacataccattaataatgcaagcataaaaaattgttagtagatgtttctaaatataggttccgtaagcaaagaatataagaatgaagcggtaatgataaaatcaatcgttatctaaaatgatcatactcatttattttattctattatattaacacatacatttttaacagcaacacattcaatattgtattgttatttttatattatttacacaattaacaatatattattagtttatattactgaattaataatataaaattcccaatcttgtcataaacacacactgagaaacagcataaacacagaatccatcaaaaatgttgataaattatctgatgttgttgttcgctgctatgataatcagatcattcgccgatagtggtaacgctatcgaaacgacattgccagaaattacaaacgctacaacagatattccagctatcagattatgcggtccagagggagatggatattgtttacacggtgactgtatccacgctagagatattgacggtatgtattgtagatgctctcatggttatacaggcattagatgtcagcatgtagtattagtagactatcaacgttcagaaaacccaaacactacaacgtcatatatcccatctcccggtattatgcttgtattagtaggcattattatgtgttgtctattatctgtttataggttcactcgacgaactaaactacctatacaagatatggttgtgccataatttttataaatttttttatgagtatttttacaaaaatgtataaagtgtatgtcttatgtatatttataaaaatgctaagtatgcgatgtatctatgttatttgtatttatctaaacaatacctctacctctagatattatacaaaaattttttatttcggcatattaaagtaaaatctagttaccttgaaaatgaatacagtgggtggttccgtatcaccagtaagaacataatagtcaaatacagtatccgattgagattttgcatacaatactagtctagaaagaaatttgtaatcatcttctgtgacgggagtccatatatctgtatcatcgtctagtttatcagtgtcccatgctatattcctgttatcatcattagttaatgaaaataactctcgtgcttcagaaaagtcaaatattgtatccatacatacatctccaaaactatcgcttatacgtttatctttaacgatacctatacctagatggttatttactaacagacattttccagatctattgactataactcctatagtttccacatcaaccaagtaatgatcatctattgttatataacaataacataactcttttccatttttatcagtatgtatatctatatcaacgtcgtcgttgtagtgaatagtagtcattgatctattatatgaaacggatatgtctagaacggcaattgttttacgtccagttaacactttcgttgatttaaagtctagagtctttgcaaacataatatccttatccgactttatatttcctgtagggtggtataattttattttgcctccacatatcggtgtttccaaatatattactagacaatattccatatagttattagttaagggtacccaattagaacacgtacgcttattatcatcatttggatcgtatttcataaaagttattgtgttatcgatgtcaacacattctacattttttaatcgtctatatagtatttttctgatattttctataatatcagaattgtcttccatcggaagttgtatactatcggaatcagttacatgtttaaataattctctgatgtcattccttatacaatcaaattcattattaaacagtttaatagtctgtagacctttatcgtcgtaaatatccattgtcttattagttacgcttatttttatgtgtttttacgttgctttattatattttataagaatgattgtttgacgaatcacgagaactattaagacacattattaggtatatattataaaaaagtttttgattacgatgttataagaggaaagaggacacattaacatcatacatcaattaactacattcttataacatcgtaatcaaaagaattgcaattttgatgtataacaactgtcaatgggttatggaattgtatattacatattatacggtatgttggtaacgacaaataccggtcggtaattgtctgccggtgtaatagaattatatatatctatctattacaccggccttgtatacataataataagttgtggtagtatgatctccatatttataatttaggactttgtattcagtatttttggaatcataaaaaataaaaaaaagttttactaatttaaaatttaaaaagtatttacatttttttcactgtttagtcgcggatatggaattcgatcctgccaaaatcaatacatcatctatagatcatgtaacaatattacaatacatagatgaaccaaatgatataagactaacagtatgcattatccgaaatattatatcaatatcacaaaaataaatacacatttggctaatcaatttcgggcttggaaaaaacgtatcgccggaagggactatatgactaacttatctagagatacaggaatacaacaatcaaaacttactgaaactatacgtaactgtcaaaaaaatagaaacatatatggtctatatatacactacaatttagttattaattggataaccgatgtgattatcaatcaatattaagagggttggtaaattggtacatagctaataatacctatactccaaatacacccaataatacaacaaccatttctgagttggatatcatcaaaatactaaataaatacgaggacgtgtatagagtaagtaaagaaaaagaatgtggaatttgctatgaagttgtttactcaaaacgatagatactttggtttattggattcgtgtactcatatattttgcataacatgcatcaatatatggcatagaacacgaagagaaaccggtgcgtcggataattgtcctatatgccgtacccgttttagaaacataacaatgagcaagttctataagctagttaactaataaataaaaagtttaatttgttgacgacgtatgtcgttattttttctcgtataaaagattaatttgattctaatataatctttagtattggataaatatcaattcaaattaattccattagattatatcataaataaaaatagtagcacacaactacttcagcaaacattctttttataaatgccatctagcgtagcgaggacacaagtgaacctataattatcaaatttattagtatcagtcacatgaaggactttacgtagagtgacgattccactatctgtggtacgaacggtttcatcttctttgatgccatcacccagatgttctataaacttggtatcctcgtccgatttcatatcctttgccaaccaatacatatagctaaactcaggcatatgttccacacatcctgaacaatgaaattctccagaagatgttacaatgtctagatttggacatttggtttcaaccgcgttaacatatgagtgaacacacccatacatgaaagcgatgagaaataggattctcatcttgccaaaatatcactagaaaaaatttatttatcagttttaaaggtataaaaaatacttattgttgctcgaatattttgtatttgatggtatacggaagattagaaatgtaggtattatcatcaactgattctatggttttatgtattctatcatgtttcactattgcgttggaaataatatcatatgcttccacatatattttattttgttttaactcataatactcacgtaattctggattattggcatatctatgaataattttagctccatgatcagtaaatattaatgagaacatagtattaccacctaccattatttttttcatctcattcaattcttaattgcaaagatctatataatcattatagcgttgacttatggactctggaatcttagacgatgtacagtcatctataatcatggcatatttaatacattgttttatagcatagtcgttatctacgatgttagatatttctctcaatgaatcaatcacacaatctaatgtaggtttatgacataatagcattttcagcagttcaatgtttttagattcgttgatggcaatggctatacatgtatatccgttatttgatctaatgttgacatctgaaccggattctagcagtaaagatactagagattgtttattatatctaacagccttgtgaagaagtgtttctcctcgtttgtcaatcatgttaatgtctttaagataaggtaggcaaatgtttatagtactaagaattgggcaagcataagacatgtcacaaagacccttttttgtatgtataagtgtaaaaattataacatccatagttggatttacataggtgtccaatcgggatctctccatcatcgagataattgatggcatctcccttccttttttagtagatatttcatcgtgtaagaatcaatattaatatttctaaagtatccgtgtatagcctctttatttaccacagctccatattccactagagggatatcgccgaatgtcatatactcaattagtatatgttggaggacatccgagttcattgttttcaatatcaaagagatggtttccttatcatttctccatagtggtacaatactacacattattccgtgcggctttccattttccaaaaacaatttgaccaaatctaaatctacatctttattgtatctataatcactatttagataatcagccataattcctcgagtgcaacatgttagatcgtctatatatgaataagcagtgttatctattcctttcattaacaatttaacgatgtctatatctatatgagatgacttaatataatattgaagagctgtacaatagtttttatctataaaagacggcttgattccgtgattaattagacatttaacaacttccggacgcacatatgctctcgtatccgactctgaatacagatgagagatgatatacagatgcaatacggtaccgcaatttcgtagttgataatcatcatacgcgtatcagtactcgtcctcataaagaacactgcagccattttctatgaacaaatcaataattttagaaacaggatcattgtcattacataattttctataactgaacgatggttttcacatttaacactcaagtcaaatccatgttctaccaacacctttatcaagtcaacgtctacatttttggatttcatatagctgaatatattaaagttatttatgttgctaaatccagtggcttctagtagagccatcgctatatccttattaactttaacatgtctactatttgtgtattcttctaatggggtaagctgtctccaatttttgcgtaatggattagtgccactgtctagtagtagtttgacgacctcgacattattacaatgctcattaaaaaggtatgcgtgtaaagcattattcttgaattggttcctggtatcattaggatctctgtctttcaacatctgtttaagttcatcaagagccacctcctcattttccaaatagtcaaacattttgactgaatgagctactgtgaactctatacacccacacaactaatgtcattaaatatcatgtcaaaaacttgtacaattattaataaaaataatttagtgtttaaattttaccagttccagattttacacctccgttaatacctccattaaccccactggacgatcctcctccccacattccaccgccaccagatgtataagttttagatcctttattactaccatcatgtccatggataaagacactccacatgccgccactaccccctttagaagacatattaataagacttaaggacaagtttaacaataaaattaatcacgagtaccctactaccaacctacactattatatgattatagtttctatttttacagtaccttgactaaagtttctagtcacaagagcaatactaccaacctacactattatatgattatagtttctatttttataggaacgcgtacgagaaaatcaaatgtctaatttctaacggtagtgttgataaacgattgttatccgcggatacctcctctatcatgtcgtctattttcttactttgttctattaacttattagcattatatattatttgattataaaacttatattgcttattagcccaatctgtaaatatcggattattaacatatcgtttctttgtaggtttatttaacatgtacatcactgtaagcatgtccttaccatttattttaatttgacgcatatccgcaatttctttttcgcagtcggttataaattctatatatgatggatacatgctacatgtgtacttataatcgactaatatgaagtacttgatacatattttcagtaacgatttattattaccacctatgaataagtacctgtgatcgtctaggtaatcaactgttttcttaatacattcgatggttggtaatttactcagaataatttccaatatcttaatatataattctgctatttctgggatatatttatctgccagtataacacaaatagtaatacatgtaaacccatattttgttattatattaatgtctgcgccattatctattaaccattctactaggctgacactatgcgactcaatacaatgataaagtatactacatccatgtttatctattttgtttatatcatcaatatacggcttacaaagttttagtatcgataacacatccaactcacgcatagagaaggtagggaataatggcataatatttattaggttatcatcattgtcattatctacaactaagtttccattttttaaaatatactcgacaactttaggatctctattgccaaatttttgaaaatatttatttatatgcttaaatctatataatgtagctccttcatcaatcatacatttaataacattgatgtatactgtatgataagatacatattctaacaatagatcttgtatagaatctgtatatcttttaagaattgtggatattaggatattattacataaactattacacaattctaaaatataaaacgtatcacggtcgaataatagttgatcaactatataattatcgattttgtgatttttcttcctaaactgtttacgtaaatagttagatagaatattcattagttcatgaccactatagttactatcgaataacgcgtcaaatatttcccgtttaatatcgcatttgtcaagataataatagagtgtggtatgttcacgataagtataataacgcatctctttttcgtgtgaaattaaatagtttattacgtccaaagatgtagcataaccatcttgtgacctagtaataatataataatagagaactgttttacccattctatcatcataatcagtggtgtagtcgtaatcgtaatcgtctaattcatcatcccaattataatattcaccagcacgtctaatctgttctattttgatcttgtatccatactgtatgttgctacatgtaggtattcctttatccaataatagtttaaacacatctacattgggatttgatgttgtagcgtatttttctacaatattaataccatttttgatactatttatttctatacctttcgaaattagtaatttcaataagtctatattgatgttatcagaacatagatattcgaatatatcaaaatcattgatatttttatagtcgactgacgacaataacaaaatcacaacatcgtttttgatattattatttttcttggtaacgtatgcctttaatggagtttcaccatcatactcatataatggatttgcaccactttctatcaatgattgtgcactgctggcatcgatgttaaatgttttacaactatcatagagtatcttatcgttaaccatgattggttgttgatgctatcgcattttttggtttctttcatttcagttatgtatggatttagcacgtttgggaagcatgagctcatatgatttcagtactgtagtgtcagtactattagtttcaataagatcaatctctagatctatagaatcaaaacacgataggtcagaagataatgaatatctgtaggcttcttgttgtactgtaacttctggttttgttagatggttgcatcgtgctttaacgtcaatggtacaaattttatcctcgctttgtgtatcatattcgtccctactataaaattgtatattcagattatcatgcgatgtgtatacgctaacggtatcaataaacggagcacaccatttagtcataaccgtaatccaaaaatttttaaagtatatcttaacgaaagaagttgtgtcattgtctacggtgtatggtactagatcctcataagtgtatatatctagagtaatgtttaatttattaaatggttgataatatggatcctcgtgacaatttccgaagatggaaataagacataaacacgcaataaatctaattgcggacatggttactccttaaaaaaatacgaataatcaccttggctatttagtaagtgtcatttaacactatactcatattaatccatggactcataatctctatacgggattaacggatgttctatatacggggatgagtagttctcttctttaactttatactttttactaatcatatttagactgatgtatgggtaatagtgtttgaagagctcgttctcatcatcagaataaatcaatatctctgtttttttgttatacagatgtattacagcctcatatattacgtaatagaacgtgtcatctaccttattaactttcaccgcatagttgtttgcaaatacggttaatcctttgacctcgtcgatttccgaccaatctgggcgtataatgaatctaaactttaattgcttgtaatcattcgaaataatttttagtttgcatccgtagttatcccctttatgtaactgtaaatttctcaacgcgatatctccattaataatgatgtcgaattcgtgctgtatacccatactgaatggatgaacgaataccgacggcgttaatagtaatttactttttcatctttacatattgggtactagttttactatcataagtttataaattccacaagctactatggaataagccaaccatcttagtataccacacatgtcttaaagtttattaattaattacatgttgttttatatatatcgctacgaatttaaagagaaattagtttaggaagaaaaattatctatctacatcatcacgtctctgtattctacgatagagtgctactttaagatgcgacagatccgtgtcatcaaatatatactccattaaaatgattattccggcagcgaacttgatattggatatatcacaacctttgttaatatctacgacaatagacagcagtcccatggttccataaacagtgagtttatctttctttgaagagatattttgtagagatcttataaaactgtcgaatgacatcgcatttatatctttagctaaatcgtatatgttaccatcgtaatatctaaccgcgtctatcttaaacgtttccatcgctttaaagacgtttccgatagatggtctcatttcatcagtcatactgagccaacaaatataatcgtgtataacatctttgatagaatcagactctaaagaaaacgaatcggctttattatacgcattcatgataaacttaatgaaaaatgtttttcgttgtttaagttggatgaatagtatgtcttaataattgttattatttcattaattaatatttagtaacgagtacactctataaaaacgagaatgacataactaatcataactagttatcaaagtgtctaggacgcgtaattttcatatggtatagatcctgtaagcattgtctgtattctggagctattttctctatcgcattagtgagttcagaatatgttataaatttaaatcgaataacgaacataactttagtaaagtcgtctatattaactcttttattttctagccatcgtaataccatgtttaagatagtatattctctagttactacgatctcatcgttgtctagaatatcacatactgaatctacatccaattttagaaattggtctgtgttacatatctcttctatattattgttgatgtattgtcgtagaaaactattacgtagaccattttctttataaaacgaatatatagtactccaattatctttaccgatatatttgcacacataatccattctctcaatcactacatctttaagattttcgttgttaagatatttggctaaactatataattctattagatcatcaacagaatcagtatatatttttctagatccaaagacgaactctttggcgtcctctataatattcccagaaaagatattttcgtgttttagtttatcgagatctgatctgttcatatacgccatgattgtacggtacgttatgataaccgcataaaataaaaatccattttcatttttaaccaatactattcataattgagattgatgtaatactttgttactttgaacgtaaagacagtacacggatccgtatctccaacaagcacgtagtaatcaaatttggtgttgttaaacttcgcaatattcatcaatttagatagaaacttatactcatcatctgttttaggaatccatgtattattaccactttccaacttatcattatcccaggctatgtttcgtccatcatcgttgcgcagagtgaataattcttttgtattcggtagttcaaatatatgatccatgcatagatcggcaaagctattgtagatgtgatttttcctaaatctaatataaaactcgtttactagcaaacactttcctgatttatcgaccaagacacatatggtttctaaatctatcaagtggtggggatccatagttatgacgcagtaacatatattattacattcttgactgtcgctaatatctaaatatttattgttatcgtattggattctgcatatagatggcttgtatgtcaaagatatagaacacataaccaatttatagtcgcgctttacattctcgaatctaaagttaagagatttagaaaacattatatcctcggatgatgttatcactgtttctggagtaggatatattaaagtctttacagatttcgtccgattcaaataaatcactaaataatatcccacattatcatctgttagagtagtatcattaaatctattatattttatgaaagatatatcactgctcacctctatatttcgtacatttttaaactgtttgtataatatctctctgatacaatcagatatatctattgtgtcggtagacgataccgttacatttgaattaatggtgttccattttacaacttttaacaagttgaccaattcatttctaatagtatcaaactctccatgattaaatattttaatagtatccattttatatcactacggacacaaagtagctgacataaaccattgtataatttttatgttttatgtttattagcgtacacattttggaagttccggcttccatgtatttcctggagagcaagtagatgatgaggaaccagatagtttatatccgtacttgcacttaaagtctacattgtcgttgtatgagtatgatcttttaaacccgctagacaagtatccgtttgatattgtaggatgtggacatttaacaatctgacacgtgggtggatcggaccattctcctcctgaacacaggacactagagttaccaatcaacgaatatccactattgcaactataagttacaacgctcccatcggtataaaaatcctcgtatccgttatgtcttccgttggatatagatggaggggattggcatttaacagattcacaaataggtgcctcgggattccataccatagatccagtagatcctaattcacaatacgatttagattcaccgatcaactgatatccgctattacaagagtacgttatactagagccaaagtctactccaccaatatcaagttggccattatcgatatctcgaggcgatgggcatctccgtttaatacattgattaaagagtgtccatccagtacctgtacatttagcatatataggtcccattttttgctttctgtatccaggtagacatagatattctatagtgtctcctatgttgtaattagcattagcatcagtctccacactattcttaaatttcatattaatgggtcgtgacggaatagtacagcatgatagaacgcatcctattcccaacaatgtcaggaacgtcacgctctccaccttcatatttatttatccgtaaaaatgttatcctggacatcgtacaaataataaaaagcccatatatgttcgctattgtagaaattgtttttcacagttgctcaaaaacgatggcagtgacttatgagttacgttacactttggagtctcatctttagtaaacatatcataatattcgatattacgagttgacatatcgaacaaattccaagtatttgattttggataatattcgtattttgcatctgctataattaagatataatcaccgcaagaacacacgaacatctttcctacatggttaaagtacatgtacaattctatccatttgtcttccttaactatatatttgtatagataattacgagtctcgtgagtaattccagtaattacatagatgtcgccgtcgtactctacagcataaactatactatgatgtctaggcatgggagacttttttatccaacgatttttagtgaaacattccacatcgtttaatactacatatttctcatacgtggtataaactccacccattacatatatatcatcgtttacgaataccgacgcgcctgaatatctaggagtaattaagtttggaagtcttatccatttcgaagtgccgtgtttcaaatattctgccacacccgttgaaatagaaaattctaatcctcctattacatataactttccatcgttaacacaagtactaacttctgattttaacgacgacatattagtaaccgttttccattttttcgttttaagatctacccgcgatacggaataaacatgtctattgttaatcatgccgccaataatgtatagacaattatgtaaaacatttgcattatagaattgtctatctgtattaccgactatcgtccaatattctgttctaggagagtaatgggttattgtggatatataatcagagtttttaatgactactatattatgttttataccatttcgtgtcactggctttgtagatttggatatagttaatcccaacaatgatatagcattgcgcatagtattagtcataaacttgggatgtaaaatgttgatgatatctacatcgtttggatttttatgtatccactttaataatatcatagctgtaacatcctcatgatttacgttaacgtcttcgtgggataagatagttgtcagttcatcctttgataattttccaaattctggatcggatgtcaccgcagtaatattgttgattatttctgacatcgacgcattatatagttttttaattccatatcttttagaaaagttaaacatccttatacaatttgtgaaattaatattatgaatcatagtttttacacatagatctactacaggcggaacatcaattattatggcagcaactagtatcatttctacattgtttatggtgatgtttatcttcttccagcgcatatagtctaatagcgattcaaacgcgtgatagtttataccattcaatataatcgcttcatcctttagatggtgatcctgaatgcgtttaaaaaaattatacggagacgccgtaataatttccttattcacttgtataatttccccattgatagaaaatattacgctttccattcttaaagtactataagtaattatagtataatgtaaacgtttatatattcaatatttttataaaaatcattttgacattaattcctttttaaatttccgtctatcatctatagaaacgtattctatgaatttataaaatgcttttacgtgtcctatcgtaggcgatagaaccgctaaaaagcctatcgaatttctacaaaagaatctgttatatggtatagggagagtataaaacattaaatgtccgtacttattaaagtattcagtagccaatcctaactctttcgaatacttattaatggctcttgttctgtacgaatctatttttttgaacaacggacctagtggtatatcttgttctatgtatctaaaataatgtctgactagatccgttagtttaatatccgcagtcatcttgtctagaatggcaaatctaactgcgggtttaggctttagtttagtttctatatctacatctatgtctttatctaacaccaaaaatataatagctaatattttattacaatcatccggatattcttctacgatctcactaactaatgtttctttggttatactagtatagtcactatcggacaaataaagaaaatcagatgatcgatgaataatacatttaaattcatcatctgtaagatttttgagatgtctcattagaatattattagggttagtactcattatcattcggcagctattacttattttattatttttcaccatatagatcaatcattagatcatcaaaatatgtttcaatcatcctaaagagtatggtgaatgactcttcccatctaatttctgaacgttcaccaatgtctctagccactttggcactaatagcgatcattcgcttagcgtcttctatattattaactggttgatttaatctatctagcaatggaccgtcggacagcgtcattctcatgttcttaatcaatgtacatacatcgccgtcatctaccaattcatccaacaacataagctttttaaaatcatcattataataggtttgatcgttgtcatttctccaaagaatatatctaataagtagagtcctcatgcttagttaacaactattttttatgttaaatcaattagtacaccgctatgtttaatacttattcatattttagtttttaggattgagaatcaatacaaaaattaatgcatcattaattttagaaatacttagtttccacgtagtcaatgaaacatttgaactcatcgtacaggacgttctcgtacaggacgtaactataaaccggtttatatttgttcaagatagatacaaatccgataactttttttacgaattctacgggatccactttaaaagtgtcataccgggttctttttatttttttaaacagatcaatggtgtgatgttgattaggtcttttacgaatttgatatagaatagcgtttacatattctccataatggtcaatcgccatttgttcgtatgtcataaattctttaattatatgacactgtgtattatttagttcatccttgttcattgttaggaatctatccaaaatggcaattatactagaactataggtgcgttgtatacacatattgatgtgtctgtttatacaatccatgatatttggatccatgctactaccttcgggtaaaattgtagcatcatataccatttctagtactttaggttcattattatccattgcagaggacgtcatgatcgaatcataaaaaaatatattatttttatgttattttgttaaaaataatcatcgaatacttcgtaagatactccttcatgaacataatcagttacaaaacgtttatatgaagtaaagtatctacgatttttacaaaagtccggatgcataagtacaaagtacgcgataaacggaataataatagatttatctagtctatctttttctatagctttcatagttagatacatggtctcagaagtaggattatgtaacatcagcttcgataaaatgactgggttatttagtcttacacattcgctcatacatgtatgaccgttaactacagagtctacactaaaatgattgaacaatagatagtctaccattgtttcgtattcagatagtacagcgtagtacatggcatcttcacaaattatatcattgtctaatagatatttgacgcatcttatggatcccacttcaacagccatcttaaaatcatattgctttcctttatcattaataatttctagaacatcatctctatcataaaagatacaaatattaactgtttgatccgtaataacattgctagtcaatagcaatttgttaataagatgcgctgggctcaatgtcttaataagaagtgtaagaggactatctccgaatttgttttgtttattaacatccgttgatggaagtaaaagatctataatgtctacattcttgactgttttagagcatacaatatggagaggtgtatttccatcatgatctggttttgagggactaattcctagtttcatcatccatgagattgtagaagcttttggattgtctgacataagatgtctatgaatatgatttttgccaaatttatccactatcctggcttcgaatccgatggacattatttttttaaacactctttctgaaggatctgtacacgccaacaacggaccacatccttcttcatcaaccgagttgttaatcttggctccatactgtaccaataaatttattctctctatgacttcatcatctgttcccgagagataatatagaggtgttttatgctgtttatcacacgcgtttggatctgcgccgtgcgtcagcagcatcgcgactattctattattattaattttagaagctatatgcaatggataatttccatcatcatccgtctcatttggagagtatcctctatgaagaagttcttcgacaaatcgttcatctagtcctttaattccacaatacgcatgtagaatgtgataattatttccagaaggttcgatagcttgtagcatattcctaaatacatctaaatttttactattatatttggcataaagagatagataatactcggccgacataatgttgtccattgtagtataaaaattaatatttctatttctatttctgtatatttgcaacaatttactctctataacaaatatcataacttagtttttttatgtcaagaaggcactggtttagttcatctataaatgtcacgccataactaccacgcatgccatactcagaattatgataaagatatttatccttggggtgtaggtaatggggattaatctttgttggatcagtctctaagttaacacatgtcacacatgatccatttatagttatatcacacgatgatgatttatgaattgattccggaagatcgctatcgtattttgtggttccacaattcatttccatacatgttattgtcacactaatattatgatgaactttatctagccgctgagtggtaaacaacagaacagatagtttattatctttaccaacaccctcagccgctgccacaaatctctgatccgtatccatgatggtcatgtttatttctagtccgtatccagtcaacactatgttagcatttctgtcgatatagctttcactcatatgacactcaccaataatagtagaattaatgtcgtaatttacaccaatagtgagttcggcggcaaagtaccaataccggtaatcttgtcgaggaggacatatagtattcttgtattctaccgaatacccgagagatgcgatacaaaagagcaagactaatttgtaaaccatcttactcaaaatatgtaacaatagtacgatgcaatgagtaagacaataggaaatctatcttatatacacataattattctatcaattttaccaattagttagtgtaatgttaacaaaaatgtgggagaatctaattagtttttctttacacaattgacgtacatgagtctgagttccttgtttttgctaattatttcatccaatttattattcttgacgatatcgagatcttttgtataggagtcaaacttgtattcaacatgcttttctataatcattttagctatttcggcatcatccaatagtacattttccagattagcagaatagatattaatgtcgtatttgaacagagcctgtaacatctcaatgtctttattatctatagccaatttaatgtccggaatgaagagaagggaattattggtgtttgtcgacgtcatatagtcgagcaagagaatcatcatatccacgtgtccattttttatagtgatgtgaatacaactaaggagaatagccagatcaaaagtagatggtatctctgaaagaaagtaggaaacaatacttacatcattaagcatgacggcatgataaaatgaagttttccatccagttttcccatagaacatcagtctccaatttttcttaacaaacagttttaccgtttgcatgttaccactatcaaccgcataatacaatgcggtgtttcccttgtcatcaaattgtgaatcatccagtccactgaatagcaaaatctttactattttggtatcttccaatgtggctgcctgatgtaatggaaattcattctctagaagatttttcaatgctccagcgttcaacaacgtacatactagacgcacgttattatcagctattgcataatacaaggcactatgtccatggacatccgccttaaatgtatctttactagagagaaagcttttcagctgcttagacttccaagtattaattcgtgacagatccatgtctgaaacgagacgctaattagtgtatattttttcattttttataattttgtcatattgcaccagaattaataatatctttaatagatctgattagtagatacatggctatcgcaaaacaacatatacacatttaataaaaataatatttattaagaaaattcagatttcacgtacccatcaatataaataaaataatgattccttacaccgtacccatattaaggagattccaccttacccataaacaatataaatccagtaatatcatgtctgatgatgaacacaaatggtgtattaaattccagtttttcaggagatgatctcgccgtagctaccataatagtagatgcctctgctacagttccttgttcgtcgacatctatctttgcattctgaaacattttataaatatataatgggtccctagtcatatgtttaaacgacgcattatctggattaaacatactaggagccatcatttcggctatcgacttaatatccctcttattttcgatagaaaatttagggagtttaagattgtacactttattccctaattgagacgaccaatagtctaattttgcagccgtgatagaatctgtgaaatgggtcatattatcacctattgccaggtacatactaatattagcatccttatacggaaggcgtaccatgtcatattctttgtcatcgattgtgattgtatttccttgcaatttagtaactacgttcatcatgggaaccgttttcgtaccgtacttattagtaaaactagcattgcgtgttttagtgatatcaaacggatattgccatatacctttaaaatatatagtattaatgattgcccatagagtattattgtcgagcatattagaatctactacattagacataccggatctacgttctactatagaattaattttattaaccgcatctcgtctaaagtttaatctatataggccgaatctatgatattgttgataatacgacggtttaatgcacacagtattatctacgaaactttgataagttagatcagtgtacgtatatttagatgttttcagcttagctaatcctgatattaattctgtaaatgctggacccagatctctttttctcaaatccatagtcttcaataattctattctagtattacctgatgcaggcaatagcgacataaacatagaaaacgaataaccaaacggtgagaagacaatattatcatcttgaatatttttatacgctactataccggcattggtaaatccttgtagacgataggcggacgctgaacacgctaacgatagtatcaataacgcaatcatgattttatggtattaataattaaccttatttttatgttcggtataaaaaaattattgatgtctacacatccttttgtaattgacatctatatatccttttgtataatcaactctaatcactttaacttttacagttttccctaccagtttatccctatattcaacatatctatccatatgcatcttaacactctctgccaagatagcttcagagtgaggatagtcaaaaagataaatatatagagcataatcattctcgtatactctgccctttattacatcacccgcattgggcaacgaataacaaaatgcaagcatcttgttaacgggctcgtaaattgggataaaaattatgtttttattgtcttatatctattttattcaagagaatattcaggaatttctttttccggttgtatctcgtcgcagtatatatcatttgtacattgtttcatattttttaatagtttacaccttttagtaggactagtatcgtacaattcatagctgtattttgaattccaatcacgcataaaaatatcttccaattgttgacgaagacctaatccatcatccggtgtaatattaatagatgctccacatgtatccgtaaagtaatttcctgtccaatttgaggtacctatataggccgttttatcggttaccatatatttggcatggtttaccctagaatacggaatgggaggatcagcatctggtacaataaatagctttacttctatatttatgtttttagattttagcatagcgatagatcttaaaaagtttctcatgataaacgaagatcgttgccagcaactaatcaatagcttaacggatacttgtctgtctatagcggatcttcttaattcatcttctatataaggccaaaacaaaattttacccgccttcgaataaataatagggataaagttcataacagatacataaacgaatttactcgcatttctaatacatgacaataaagcggttaaatcattggttctttccatagtacatagttgttgcggtgcagaagcaataaatacagagtgtggaacgccgcttacgttaatactaagaggatgatctgtattataatacgacggataaaagtttttccaattatatggtagattgttaactccaagataccagtatacctcaaaaatttgagtgagatccgctgccaagttcctattattgaagatcgcaatacccaattccttgacctgagttagtgatctccaatccatgttagcgcttcctaaataaatatgtgtattatcagatatccaaaattttgtatgaagaactcctcctaggatatttgtaatatctatgtatcgtacttcaactccggccatttgtagtctttcaacatcctttaatggtttgttagatttattaacggctactctaactcgtactcctcttttgggtaattgtacaatctcgtttaatattatcgtgccgaaattcgtacccacttcatccgataaactccaataaaaagatgatatatctagtgtttttgtggtattggatagaatttccctccacatgttaaatgtagacaaatatactttatcaaattgcatacctataggaatagtttctgtaatcactgcgattgtattatccggattcattttatttgttaaaagaataatcctatatcacttcactctattaaaaatccaagtttctatttctttcatgactgattttttaacttcatccgtttccttatgaagatgatgtttggcaccttcataaatttttatttctctattacaatttgcatgttgcatgaaataatatgcacctaaaacatcgctaatcttattgtttgttccctggagtatgagagtcggggggtgttaatcttggaaattatttttctaaccttgttggtagccttcaagacctgactagcaaatccagccttaattttttcatgattgactaatgggtcgtattggtatttataaactttatccatatctctagatactgattctggacatagctttccgactggcgcatttggtgtgatggttcccataagtttggcagctagcagattcagtcttgaaacagcatctgcattaactagaggagacattagaatcattgctgtaaacaagtttggattatcgtaagaggctagctcccatggaatgacccaataagtagatttaatagttaccacgtgctgtaccaaagtcatcaatcatcattttttcaccattacttcttccatgtccaatatgatcatgtgagaatactaaaattcctaacgatgatatgttttcagctagttcgtcataacgtccagaatgtttaccagctccatgacttatgaatactaatgccttaggatatgtaataggtttccaatatttacaatatatgtaatcattgtccagattgaacatacagtttgcactcatgattcacgttatataactatcaatattaacagttcgtttgatgatcatattatttttatgttttattgataattgtaaaaacatacaattaaatcaatatagaggaaggagacggctactgtcttttgtaagatagtcatggcgactaaattagattatgaggatgctgttttttactttgtggatgatgataaaatatgtagtcgcgactccatcatcgatctaatagatgaatatattacgtggagaaatcatgttatagtgtttaacaaagatattaccagttgtggaagactgtacaaggaattgatgaagttcgatgatgtcgctatacggtactatggtattgataaaattaatgagattgtcgaagctatgagcgaaggagaccactacatcaattttacaaaagtccatgatcaggaaagtttattcgctaccataggaatatgtgctaaaatcactgaacattggggatacaaaaagatttcagaatctagattccaatcattgggaaacattacagatttgatgaccgacgataatataaacatcttgatactttttctagaaaaaaaattgaattgatgatataggggtcttcataacgcataattattacgttagcattctatatccgtgttaaaaaaaattatcctatcatgtatttgagagttttatatgtagcaaacatgatagctgtgatgccaataagctttagatattcacgcgtgctagtgttagggatggtattatctggtggtgaaatgtccgttatataatctacaaaacaatcatcgcatatagtatgcgatagtagagtaaacatttttatagtttttactggattcatacatcgtctacccaattcggttataaatgaaattgtcgccaatcttacacccaaccccttgttatccattagcatagtattaacttcgttatttatgtcataaactgtaaatgattttgtagatgccatatcatacatgatattcatgtccctattataatcattactaactttatcacaatatatgttgataatatctatatatgatctagtctttgtgggcaactgtctatacaagtcgtctaaacgttgtttactcatatagtatcgaacagccatcattacatggtcccgttccgttgatagataatcgagtatgttagtggacttgtcaaatctatataccatattttctggaagtggatatacatagtcgtgatcaacattattgctagcctcatcttctatatcctgtactataccattatctatatcatctacataatctatgatattattacacataaacatcgacaacatactattgtttattatctaagtcctgttgatccaaacccttgatctcctctatttgtactatctagagattgtacttcttccagttctggataatatatacgttgatagattagctgagctattctatctccagtatttacattaaacgtacattttccattattaataagaatgactcctatgtttcccctataatcttcgtctattacaccacctcctatatcaatgccttttagtgacagaccagacctaggagctattctaccatagcagaacttaggcatggacatactaatatctgtcttaattaactgtctttctcctggagggatagtataatcgtaagcgctatacaaatcatatccggcagcacccggcgattgcctagtaggagatttagctctgttagtttccttaacaaatctaactggtgagttaatattcatgttgaacataaaactaatattttatttcaaaattatttaccatcccatatattccatgaataagtgtgatgattgtacacttctatagtatctatatacgatccacgataaaatcctcctatcaatagcagtttattatccactatgatcaattctggattatccctcggataaataggatcatctatcagagtccatgtattgctggattcacaataaaattccgcatttctaccaaccaagaataaccttctaccgaacactaacgcgcatgatttataatgaggataataagtggatggtccaaactgccactgatcatgattgggtagcaaatattctgtagttgtatcagtttcagaatgtcctcccattacgtatataacattgtttatggatgccactgctggattacatctaggtttcagaagactcggcatattaacccaagcagcatccccgtggaaccaacgctcaacagatgtgggatttggtagacctcctactacgtataatttattgttagcgggtatcccgctagcatacagtctggggctattcatcggaggaattggaatccaattgtttgatatataatttacagctatagcattgttatgtatttcattgttcatccatccaccgatgagatatactacttctccaacatgagtacttgtacacatatggaatatatctataatttgatccatgttcataggatactctatgaatggatacttgtatgatttgcgtggttgtttatcacaatgaaatattttggtacagtctagtatccattttacattatttatacctctgggagaaagataatttgacctgattacatttttgataaggagtagcagatttcctaatttatttcttcgcctcatataccacttaatgacaaaatcaactacataatcctcatctggaacatttagttcatcgctttctagaataagtttcatagatagataatcaaaattgtctatgatgtcatcttccagttccaaaaagtgtttggcaataaagtttttagtatgacataagagattggatagtccgtattctatacccatcatgtaacactcgacacaatattcctttctaaaatctcgtaagataaagtttatacaagtgtagatgataaattctacagaggttaatatagaagcacgtaataaattgacgacgttatgactatctatatatacctttccagtatatgagtaaataactatagaagttaaactgtgaatgtcaaggtctagacaaacccttgtaactggatctttatttttcgtgtatttttgacgtaaatgtgtgcgaaagtaaggagataactttttcaatatcgtagaattgactattatattgcctcctatggcatcaataattgttttgaatttcttagtcatagacaatgctaatatattcttacagtacacagtattgacaaatatcggcatttatgtttctttaaaagtcaacatctagagaaaaatgattatctttttgagacataactcccattttttggtattcacccacacgtttttcgaaaaaattagtttttccttccaatgatatattttccatgaaatcaaacggattggtaacattataaatttttttaaatcccaattcagaaatcaatctatccgcgacgaattctatatatgttttcatcatttcacaattcattcctataagtttaactggaagagccgcagtaagaaattcttgttcaatggatactgcatctgttataatagatctaacggtttcttcactcggtggatgcaataaatgtttaaacatcaaacatgcgaaatcgcagtgcagaccctcgtctctactaattagttcgttggaaaacgtgagtccgggcattaggccacgctttttaagccaaaatatggaagcgaatgatccagaaaagaaaattccttctactgcagcaaaggcaataagtctctctccataaccggcgctgtcatgtatccacttttgagcccaatcggccttcttttttacacaaggcatcgtttctatggcattaaagagatagtttttttcattactatctttaacataagtatcgatcaaaagactatacatttccgaatgaatgttttcaatggccatctgaaatccgtagaaacatctagcctcggtaatctgtacttctgtacaaaatcgttccgccaaattttcattcactattccgtcactggctgcaaaaaacgccaatacatgttttataaaatatttttcgtctggtgttagtttattccaatcattgatatctttagatatatctacttcttccactgtccaaaatgatgcctctgcctttttatacatgttccagatgtcatgatattggattgggaaaataacaaatctatttggatttggtgcaaggatgggttccataactaaattaacaataacaataaattttttttcagttatctatatgcctgtacttggattttttgtacatcgatatcgccgcaatcactacaataattacaagtattattgatagcattgttattagtactatcataattaaattatctacattcatgggtgctgaataatcgttattatcatcattatcattttgtaattgtgacatcatactagataaatcgtttgcgagattgttgtgggaagcgggcatggaggatgcattatcattattatttaacgccttccatttggattcacaaatgttacgcacattcaacattttatggaaactataattttgtgaaaacaaataacaagaaaactcgtcatcgttcaaatttttaacgatagtaaaccgattaaacgtcgagctaatttctaacgctagcgactctgttggatatgggtttccagatatatatcttttcagttcccctacgtatctataatcatctgtaggaaatggaagatatttccatttatctactgttcctaatatcatatgtggtggtgtagtagaaccattaagcgcgaaagatgttatttcgcatcgtattttaacttcgcaataatttctggttagataacgcactctaccagtcaagtcaatgatattagcctttacagatatattcatagtagtcgtaacgatgactccatcttttagatgcgatactcctttgtatgtaccagaatcttcgtacctcaaactcgatatatttaaacaagttaatgagatattaacgcgttttatgaatgatgatatataaccagaagttttatcctcggtggctagcgctataaccttatcattataataccaactagtgtgattaatatgtgacacgtcagtgtgggtacaaatatgtacattatcgtctacgtcgtattcgatacatccgcatacagccaacaaatataaaatgacaaatactctaacgccgttcgtacccatcttgatgcggtttaataaatgttttgatttcaatttattgtaaaaaaagattcggttttatactgttcgatattctcattgcttatattttcatctatcatctccacacagtcaaatccgtggttagcatgcacctcatcaaccggtaaaagactatcggactcttctatcattataactctagaatatttaatttggtcattattaatcaagtcaattatcttatttttaacaaacgtgagtattttactcattttttataaaaacttttagaaatatacagactctatcgtgtgtctatatcttctttttatatccaatgtatttatgtctgatttttcttcatttatcatatataatggtccaaattctacacgtgcttcggattcatccagatcattaaggttcttataattgtaacatccttctcttccctcttctacatcttccttcttattcttattcttagcgtcacagaatctaccacagcaggatcccatgacgagcgtcatattaaactaatccattttcaattataatatatgattagtaatgaccattaaaataaaaaatattcttcataaccggcaagaaagtgaaaagttcacattgaaactatgtcagtagtatacatcatgaaatgatgatatatatatactctattttggtggaggattatatgatataattcgtggataatcatttttaagacacatttctttattcgtaaatcttttcacgttaaatgagtgtccatattttgcaatttcttcatatgatggcggtgtacgtggacgaggctgctcctgttcttgttgtggtcgccgactgtcgtgtctgcgtttagatccctccattatcgcgattgcgtagatggagtactattttataccttgtaattaaatttttttattaattaaacgtataaaaacgttccgtatctgtatttaagagccagatttcgtctaatagaacaaatagctacagtaaaaataactagaataattgctacacccactagaaaccacggatcgtaatacggcaatcggttttcgataataggtggaacgtatattttatttaaggacttaacaattgtctgtaaaccacaatttgcttccgcggatcctgtattaactatctgtaaaagcatatgttgaccgggcggagccgaacattctccgatatctaatttctgtatatctataatattattaacctccgcatacgcattacagttcttttctagcttggataccgcactaggtacatcgtctagatctattcctatttcctcagcgatagctcttctatccttttccggaagcaatgaaatcacttcaataaatgattcaaccatgagtgtgaaactaagtcgagaattactcatgcatttgttagttattcggagcgcgcaatttttaaactgtcctataacctctcctatatgaatagcacaagtgacattagtagggatagaatgttgagctaatttttgtaaataactatctataaaaagattatacaaagttttaaactctttagtttccgccatttatccagtctgagaaaatgtctctcataataaatttttccaagaaactaattgggtgaagaatggaaacctttaatctatatttatcacagtctgttttggtacacatgatgaattcttccaatgccgtactaaattcgatatctttttcgatttctggatatgtttttaataaagtatgaacaaagaaatggaaatcgtaataccagttatgtttaactttgaaattgttttttattttcttgttaatgattccagccacttgggaaaagtcaaagtcgtttaatgccgatttaatacgttcattaaaaacaaactttttatcctttagatgaattattattggttcattggaatcaaaaagtaagatattatcgggtttaagatctgcgtgtaaaaagttgtcgcaacagggtagttcgtagattttaatgtataacagagccatctgtaaaaagataaactttatgtattgtaccaaagatttaaatcctaatttgatagctaactcggtatctactttatctgccgaatacagtgctaggggaaaaattataatgtttcctctttcatattcgtagttagttctcttttcatgttcgaaaaagtgaaacatgcggttaaaatagtttataacattaatattactgttaataactgccggataaaagtgggatagtaatttcacgaatttgatactgtcctttctctcgttaaacgcctttaaaaaaactttagaagaatatctcaatgagagttcctgaccatccatagtttgtatcaataatagcaacatatgaagaacacgtttatacagagtatgtaaaaatgttaatttatagtttaatcccatggcccacgcacacacgattaattttttttcatctccctttagattgttgtatagaaatttgggtactgtgaactccgccgtagtttccatgggactatataattttgtggcctcgaatacaaattttactacatagttatctatcttaaagactataccatatcctcctgtagatatgtgataaaaatcgtcgtttataggataaaatcgtttatccttttgttggaaaaaggatgaattaatgtaatcattctcttctatctttagtagtgtttccttattaaaattcttaaaataatttaacaatctaactgacggagcccaattttggtgtaaatctaattgggacattatattgttaaaatacaaacagtctcctaatataacagtatctgataatctatggggagacatccattgatattcaggggatgaatcattggcaacacccatttattgtacaaaaagccccaatttacaaacgaaagtccaggtttgatagagacaaacaattaactattttgtctctgtttttaacacctccacagtttttaatttctttagtaatgaaattattcacaatatcagtatcttctttatctaccagagattttactaacttgataaccttggctgtctcattcaatagggtagtaatatttgtatgtgtgatattgatatctttttgaattgtttcttttagaagtgattctttgatggtgccagcatacgaattacaataatgcagaaactcggttaacatgcaggaattatagtaagccaattccaattgttgcctgtgttgtattagagtgtcaatatgagcaatggtgtccttgcgtttctctgatagaatgcgagcagcgattttggcgttatcatttgacgatatttctggaatgacgaatcctgtttctactaactttttggtaggacaaagtgaaacaatcaagaagatagcttctcctcctatttgtggaagaaattgaactcctctagatgatctactgacgatagtatctccttgacagatattggaccgaattacagaagtacctggaatgtaaagccctgaaaccccctcattttttaagcagattgttgccgtaaatcctgcactatgcccaagatagagagctcctttggtgaatccatctctatgtttcagtttaaccaagaaacagtcagctggtctaaaatttccatctctatctaatacagcatctaacttgatgtcaggaactatgaccggtttaatgttatatgtaacattgagtaaatccttaagttcataatcatcactgtcatcagttatgtacgatccaaacaatgtttctaccggcatagtggatacgaagatgctatccatcagaatgtttccctgattagtattttctatatagctattcttctttaaacgattttccaaatcagtaactatgttcatttttttaggagtaggacgcctagccagtatggaagaggattttctagatcctctcttcaacatctttgatctcgatggaatgcaaaaccccatagtgaaacaaccaacgataaaaataatattgtttttcactttttataattttaccatctgactcatggattcattaatatctttataagagctactaacgtataattctttataactgaactgagatatatacaccggatctatggtttccataattgagtaaatgaatgctcggcaataactaatggcaaatgtatagaacaacgaaattatactagagttgttaaagttaatattttctatgagctgttccaataaattatttgttgtgactgcgttcaagtcataaatcatcttgatactatccagtaaaccgtttttaagttctggaatattatcatcccattgtaaagcccctaattcgactatcgaatatcctgctctgatagcagtttcaatatcgacggacgtcaatactgtaataaaggtggtagtattgtcatcatcgtgataaactacgggaatatggtcgttagtaggtacggtaactttacacaacgcgatatataactttccttttgtaccatttttaacgtagttgggacgtcctgcagggtattgttttgaagaaatgatatcgagaacagatttgatacgatatttgttggattcctgattattcactataatataatctagacagatagatgattcgataaatagagaaggtatatcgttggtaggataatacatccccattccagtattctcggatactctattgatgacactagttaagaacatgtcttctattctagaaaacgaaaacatcctacatggactcattaaaacttctaacgctcctgattgtgtctcgaatgcctcgtacaaggatttcaaggatgccatagattctttgaccaacgatttagaattgcgtttagcatctgatttttttattaaatcgaatggtcggctctctggtttgctaccccaatgataacaatagtcttgtaaagataaaccgcaagaaaatttatacgcatccatccaaataaccctagcaccatcggatgatattaatgtattattatagattttccatccacaattattgggccagtatactgttagcaacggtatatcgaatagattactcatgtaacctactagaatgatagttcgtgtactagtcataatatctttaatccaatctaaaaaatttaaaattagattttttacactgttaaagttaacaaaagtattacccgggtacgtggatatcatatatggcattggtccattatcagtaatagctccataaactgatacggcgatggtttttatatgtgtttgatctaacgaggaagaaattcgcgcccacaattcatctctagatatgtatttaatatcaaacggtaacacatcaatttcgggacgcgtatatgtttctaaatttttaatccaaatataatgatgacctatatgccctattatcatactgtcaactatagtacacctagggaacttacgatacatctgtttcctataatcgttaaattttacaaatctataacatgctaaaccttttgacgacagccattcattaatttctgatatggaatctgtattctcgataccgtatcgttctaaagccagtgctatatctccctgttcgtgggaacgctttcgtataatatcgatcaacggataatctgaagtttttggagaataatatgactcatgatctatttcgtccataaacaatctagacataggaattggaggcgatgatcttaattttgtgcaatgagtcgtcaatcctataacttctaatcttgtaatattcatcatcgacataatactatctatgttatcatcgtatattagtataccatgaccttcttcatttcgtgccaaaatgatatacagtcttaaatagttacgcaatatctcaatagtttcataattgttagctgttttcatcaaggtttgtatcctgtttaacatgatggcgttctataacgtctctattttctatttttaattttttaaatttttaacgatttactgtggctagatacccaatctctctcaaatatttttttagcctcgcttacaagctgtttatctatactattaaaactgacgaatccgtgattttggtaatgggttccgtcgaaatttgccgaagtgatatgaacatattcgtcgtcgactatcaacaattttgtattattctgaatagtgaaaaccttcacagatagatcattttgaacacacaacgcatctagacttttggcggttgccatagaatatacgtcgttcttatcccaattaccaactagaagtctgatcttaactcctctattaatggctgcttctataatggagttgtaaatgtcgggccaatagtagctattaccgtcgacacgtgtagtgggaactatggccaaatgttcaatatctatactagtcttagctgacctgagtttatcaataactacatcggtatctagatctctagaatatcccaataggtgttccggagaatcagtaaagaacactccacctataggattcttaatatgatacgcagtgctaactggcaaacaacaagccgcagagcataaattcaaccatgaattttttgcgctattaaaggctttaaaagtatcaaatcttctacgaagatctgtggccagcgggggataatcagaatatacacctaacgttttaatcgtatgtatagatcctccagtaaatgacgcgtttcctacataacatctttcatcatctgacacccaaaaacaaccgagtagtagtcccacattattttttttatctatattaacggttataaaatttatatccgggcagtgactttgtagctctcccagatttcttttccctcgttcatctagcaaaactattattttaatccctttttcagatgcctcttttagtttatcaaaaataagcgctcccctagtcgtactcagaggattacaacaaaaagatgctatgtatatatatttcttagctagagtgataatttcgttaaaacattcaaatgttgttaaatgatcggatctaaaatccatattttctggtagtgtttctaccagcctacattttgctcccgcaggtaccgatgcaaatggccacatttagttaacataaaaacttatacatcctgttctatcaacgattctagaatatcatcggctatatcgctaaaattttcatcaaagtcgacatcacaacctaactcagtcaatatattaagaagttccatgatgtcatcttcgtctatttctatatccgtatccattgtagattgttgaccgattatcgagtttaaatcattactaatactcaatccttcagaatacaatctgtgtttcattgtaaatttataggcggtgtatttaagttggtagattttcaattatgtattaatatagcaacagtagttcttgctcctccttgattctagcatcctcttcattattttcttctacgtacataaacatgtccaatacgttagacaacacaccgacgatggcggccgcaggatcctgcgaagcttacagacacgaatatgactaaaccgatgaccatttaaaaacccctctctagctttcacttaaactgtatcgatcattcttttagcacatgtataatataaaaacattattctatttcgaatttaggcttccaaaaatttttcatccgtaaaccgataataatatatatagacttgttaatagtcggaataaatagattaatgcttaaactatcatcatctccacgattagagatacaatatttacattctttttgctgtttcgaaactttatcaatacacgttaatacaaacccaggaaggagatattgaaactgaggctgttgaaaatgaaacggtgaatacaataattcagataatgtaaaatcatgattccgtattctgatgatattagaactgctaatggatgtcgatggtatgtatctaggagtatctattttaacaaagcatcgatttgctaatatacaattatccttttgattaattgttattttattcatattcttaaaaggtttcatatttatcaattcttctacattaaaaatttccatttttaatttatgtagccccgcaatactcctcattacgtttcattttttgtctataatatccattttgttcatctcggtacatagattatccaattgagaagcgcatttagtagttttgtacattttaagtttattgacgaatcgtcgaaaactagttatagttaacattttattatttgataccctgatattaatacccctgccgttactattatttataactgatgtaatccacgtaacattggaattaactatcgatagtaatgcatcgacgcttccaaaattgtctattataaactcaccgataatttttttattgcatgttttcatattcattaggattatcaaatctttaatcttattacgattgtatgcgttgatattacaagacgtcattctaaaagacggaggatctccatcaaatgccagacaatcacgtacaaagtacatggaaataggttttgttctattgcgcatcatagatttatatagaacacccgtagaaatactaatttgttttactctataaaatactaatgcatctatttcatcgttttgtataacgtctttccaagtgtcaaattccaaatttttttcattgatagtaccaaattcttctatctctttaactacttgcatagataggtaattacagtgatgcctacatgccgttttttgaaactgaatagatgcgtctagaagcgatgctacgctagtcacaatcaccactttcatatttagaatatatatatgtaaaaatatagtagaatttcattttgtttttttctatgctataaatgaattctcattttgcatctgctcatactccgttttatattaataccaaagaaggaagatatctggttctaaaagccgttaaagtatgcgatgttagaactgtagaatgcgaaggaagtaaagcttcctgcgtactcaaagtagataaaccctcatcgcccgcgtgtgagagaagaccttcgtccccgtccagatgcgagagaatgaataaccctggaaaacaagttccgtttatgaggacggacatgctacaaaatatgttcgcggctaatcgcgataatgtagcttctagacttttgtcctaaaatactattatatccttttcgatattaataaatccgtgtcgtccaggttttttatctctttcagtatgtgaatagataggtattttatctctattcatcatcgaatttaagagatccgataaacattgtttgtattctccagatgtcagcatctgatacaacaatatatgtgcacataaacctctggcacttatttcatgtaccttccccttatcactaaggagaatagtatttgagaaatatgtatacatgatattatcatgaattagatatacagaatttgtaacactctcgaaatcacacgatgtgtcggcgttaagatctaatatatcactcgataacacattttcatctagatacactagacattttttaaagctaaaatagtctttagtagtaacagtaactatgcgattattttcatcgatgatacatttcatcggcatattattacgcttaccatcaaagactataccatgtgtatatctaacgtattctagcatggttgccatacgcgcattaaacttttcaggatctttggatagatcttccaatctatctatttgagaaaacatttttatcatgttcaatagttgaaacgtcggatccactatatagatattatctataaagattttaggaactacgttcatggtatcctggcgaatattaaaactatcaatgatatgattatcgttttcatcttttatcaccatatagtttctaagatatgggattttacttaatataatattatttcccgtgataaattttattagaaaggccaaatctataagaaaagtcctagaattagtctgaagaatatctatatcgccgtatagtatatttggattaattagatatagagaatatgatccgtaacatatacaacttttattatggcgtctaagatattcttccatcaacttattaacatttttgactagggaagatacattatgacgtcccattacttttgccttgtctattactgcgacgttcatagaatttagcatatctcttgccaattcttccattgatgttacattataagaaattttagatgaaattacatttggagctttaatagtaagaactcctaatatgtccgtgtatgtggtcactaatacagattgtagttctataatcgtaaataatttacctatattatatgtttgagtctgtttagaaaagtagctaagtatacgatcttttatttctgatgcagatgtattaacatcggaaaaaaatctttttttattcttttttactaaagatacaaatatgtctttgttaaaaacagttattttctgaatatttctagcttgtaattttaacatatgatattcgttcacactaggtactctgcctaaataggtttctataatctttaatgtaatattaggaaaagtattctgatcaggattcctattcattttgaggatttaaaactctgattattgtctaatatggtctctacgcaaactttttcacagagcgatagagtttttgataactcgtttttcttaagaaatataaaactactgtctccagagctcgctctatcttttattttatctaattcgatacaaactcctgatactggttcagaaagtaattcattaattttcagtcctttatagaagatatttaatatagataatacaaaatcttcagtttttgatatcgatctgattgatcctagaactagatatattaataacgtgctcattaggcagtttatggcagcttgataattagatatagtatattccagttcatatttattagataccgcattgcccagattttgatattctatgaattcctctgaaaataaatccaaaataactagacattctattttttgtggattagtgtactctcttccctctatcatgttcactactggtgtccacgatgataaatatctagagggaatataatatagtccataggatgccaatctagcaatgtcgaataactgtaattttattcttcgctcttcattatgaattgattcttgaggtataaacctaacacaaattatattattagacttttcgtatgtaatgtctttcatgttataagtttttaatcctggaatagaatctattttaatgaggcttttaaacgcagagttctccaacgagtcaaagcataatactctgttgtttttcttatatacgatgttacgattttcttctttgaatggaataggtttttgaattagtttataattacaacataatagataaggaagtgtgcaaatagtacgcggaaaaaacataatagctcccctgttttcatccatggttttaagtaaatgatcactggcttctttagtcaatggatattcgaacattaaccgtttcatcatcattggacagaatccatatttcttaatgtaaagagtgatcaaatcattgtgtttattgtaccatcttgttgtaaatgtgtattcggttatcggatctgctcctttttctattaaagtatcgatgtcaatctcgtctaagaattcaactatatcgacatatttcatttgtatacacataaccattactaacgtagaatgtataggaagagatgtaacgggaacagggtttgttgattcgcaaactattctaatacataattcttctgttaatacgtcttgcacgtaatctattatagatgccaagatatctatataattattttgtaagatgatgttaactatgtgatctatataagtagtgtaataattcatgtattttgatatatgttccaactctgtctttgtgatgtctagtttcgtaatatctatagcatcctcaaaaaatatattcgcatatattcccaagtcttcagttctatcttctaaaaaatcttcaacgtatggaatataataatctattttacctcttctgatatcattaatgatatagtttttgacactatcttctgtcaattgattcttattcactatatctaagaaacggatagcgtccctaggacgaactactgccattaatatctctattatagcttctggacataattcatctattataccagaattaatgggaactattccgtatctatctaacatagttttaagaaagtcagaatctaagacttgatgttcatatattggttcatacatgaaatgatctctattgatgatagtgactatttcattctctgaaaattggtaactcattctatatatgctttccttgttgatgaaggatagaatatactcaatagaatttgtaccaacaaactgttctcttatgaatcgtatatcatcatctgaaataatcatgtaaggcatacatttaacaattagagacttgtctcctgttatcaatatactattcttgtgataatttatgtgtgaggcaaatttgtccacgttctttaattttgttatagtagatatcaaatccaatggagctacagttcttggcttaaacagatatagtttttctggaacaaattctacaacattattataaaggactttgggtagataagtgggatgaaatcctattttaattaatgcgatagccttgtcctcgtgcagatatccaaacgcttttgtgatagtatggcattcattgtctagaaacgctctacgaatatctgtgacagatatcatctttagagaatatactagtcgcgttaatagtactacaatttgtattttttaatctatctcaataaaaaaattaatatgtatgattcaatgtataactaaactactaactgttattgataactagaatcagaatctaatgatgacgtaaccaagaagtttatctactgccaatttagctgcattatttttagcatctcgtttagattttccatcggccttatcgaatactcttccgtcgatgtctacacaggcataaaatgtaggagagttactaggcccaactgattcaatacgaaaagaccaatctctcctagtaatttggcagtactcattaataacggtgacagggttagcatctttccaatcaataatttttttagccggaataacatcatcaaaagacttatgatcctctctcattgatttttcgcgggatacatcatctattatgacgtcagccatagcatcagcatccggcttatccgcctccgttgtcataaaccaacgaggaggaatatcgtcggagctgtacaccatagcactacgttgaagatcgtacagagctttattaacttctcgcttctccatattaagttgtctagttagttgtgcagcagtagctccttcgattccaatgtttttaatagccgcacacacaatctctgcgtcagaacgctcgtcaatatagatcttagacatttttagagagaactaacgcaaccagcaataaaactgaacctactttatcatttttttattcatcatcctctggtggttcgtcgttcctatcaaatgtagctctgattaacccgtcatctataggtgatgctggttctggagattctggaggagatggattattatctggaagaatctctgttatttccttgttttcatgtatcgattgcgttgtaacattaagattgcgaaatgctctaaatttgggaggcttaaagtgttgtttgcaatctctacacgcgtgtctaactagtggaggttcgtcagctgctctagtttgaatcatcatcggcgtagtattcctacttttacagttaggacacggtgtattgtatttctcgtcgagaacgttaaaataatcgttgtaactcacatcctttattttatctatattgtattctactcctttcttaatgcattttataccgaataagagatagcgaaggaattctttttcggtgccgctagtacccttaatcatatcacatagtgttttatattccaaatttgtggcaatagacggtttatttctatacgatagtttgtttctggaatcctttgagtattctataccaatattattctttgattcgaatttagtttcttcgatattagattttgtattacctatattcttgatgtagtactttgatgatttttccatggcccattctattaagtcttccaagttggcatcatccacatattgtgatagtaattctcggatatcagtagcggctaccgccattgatgtttgttcattggatgagtaactactaatgtatacattttccatttataacacttatgtattaactttgttcatttatattttttcattattatgttgatattaacaaaagtgaatatatatatgttaataattgtattgtggttatacggctacaattttataatgagtgaaagtcagtgtccgatgatcaatgacgatagctttactctgaaaagaaagtatcaaatcgatagtgcggagtcaacaataaaaatggataagaagaggataaagtttcagaatagagccaaaatggtaaaagaaataaatcagacaataagagcagcacaaactcattacgagacattgaaactaggatacataaaatttaagagaatgattatgactactactctagaagatatagcaccatctattccaaataatcagaaaacttataaactattctcggacatttcagccatcggcaaagcatcacagaatccgagtaagatggtatatgctctgctgctttacatgtttcccaatttgtttggagatgatcatagattcattcgttatagaatgcatccaatgagtaaaatcaaacacaagatcttctctcctttcaaacttaatcttattagaatattagtggaagaaagattctataataatgaatgcagatctaataaatggagaataattggaacacaagttgataaaatgttgatagctgaatctgataaatatacaatagatgcaaggtataacctaaaacccatgtatagaatcaagggagaatctgaagaagataccctctttatcaaacagatggtagaacaatgtgtgacatcccaggaattggtggaaaaagtgttgaagatactgtttagagatttgttcaagagtggagaatacaaagcgtacagatacgatgatgatgtagaaaatggatttattggattggatacactaaaattaaacattgttcatgatatagttgaaccatgtatgcctgttcgtaggccagtggctaagatactgtgtaaagaaatggtaaataaatactttgagaatccgctacatattattggtaaaaatcttcaagagtgcattgactttgttagtgaataggcatttcatctttctccaatactaattcaaattgttaaattaataatggatagtataaatagttattagttataagatagtaaaaataattattagaataagagtgtagtatcatagataactctcttctataaaaatggattttattcgtagaaagtatcttatatacacagtagaaaataatatagattttttaaaggatgatacattaagtaaagtaaacaattttaccctcaatcatgtactagctctcaagtatctagttagcaattttcctcaacacgttattactaaggatgtattagctaataccaatttttttgttttcatacatatggtacgatgttgtaaagtgtacgaagcggttttacgacacgcatttgatgcacccacgttgtacgttaaagcattgactaagaattatttatcgtttagtaacgcaatacaatcgtacaaggaaaccgtgcataaactaacacaagatgaaaaatttttagaggttgccgaatacatggacgaattaggagaacttataggcgtaaattatgacttagttcttaatccattatttcacggaggggaacccatcaaagatatggaaatcatttttttaaaactgtttaagaaaacagacttcaaagttgttaaaaaattaagtgttataagattacttatttgggcatacctaagcaagaaagatacaggcatagagtttgcggataatgatagacaaaatatatacactctatttcaacaaactggtagaatcgtccatagcaatctaacagaaacgtttagagattatatctttcccggagataagactagctattgggtgtggttaaacgaaagtatagctaatgatgcggatatcgttcttaatagacacgccattaccatgtatgataaaattcttagttatatatactctgagataaaacaaggacgcgttaataaaaacatgcttaagttagtttatatctttgagcctgaaaaagatatcagagaacttctgctagaaatcatatatgatattcctggagatatcctatctattattgatgcaaaaaacgacgattggaaaaaatattttattagtttttataaagctaattttattaacggtaatacatttattagtgatagaacgtttaacgaggacttattcagagttgttgttcaaatagatcccgaatatttcgataatgaacgaattatgtctttattctctacgagtgctgcggacattaaacgatttgatgagttagatattaataacagttatatatctaatataatttatgaggtgaacgatatcacattagatacaatggatgatatgaagaagtgtcaaatctttaacgaggatacgtcgtattatgttaaggaatacaatacatacctgtttttgcacgagtcggatcccatggtcatagagaacggaatactaaagaaactgtcatctataaaatccaagagtagacggctgaacttgtttagcaaaaacattttaaaatattatttagacggacaattggctcgtctaggtcttgtgttagatgattataaaggagacttgttagttaaaatgataaaccatcttaagtctgtggaggatgtatccgcattcgttcgattttctacagataaaaaccctagtattcttccatcgctaatcaaaactattttagctagttataatatttccatcatcgtcttatttcaaaggtttttgagagataatctatatcatgtagaagaattcttggataaaagcatccatctaaccaagacggataagaaatatatacttcaattgataagacacggtagatcatagaacagaccaaatatattattaataatttgtatatacatagatataattatcacacatttttgataaatgggaactgctgcaacaattcagactcccaccaaattaatgaataaagaaaatgcagaaatgattttggaaaaaattgttgatcatatagttatgtatattagtgacgaatcaagtgattcagaaaataatcctgaatatattgattttcgtaacagatacgaagactatagatctctcattataaaaagtgatcacgagtttgtaaagctatgtaaaaatcatgcggagaaaagttctccagaaacgcaacaaatgattatcaaacacatatacgaacaatatcttattccagtatctgaagtactattaaaacctataatgtccatgggtgacataattacatataacggatgtaaagacaatgaatggatgctagaacaactctctaccctaaactttaacaatctccgcacatggaactcatgtagcataggcaatgtaacgcgtctgttttatacattttttagttatctgatgaaagataaactaaatatataagtataatcccattctaatactttaacctgatgtattagcatcttattagaatattaacctaactaaaagacataacataaaaactcattacatagttgataaaaagcggtaggatataaatattatggctgccaccgttccgcgttttgacgacgtgtacaaaaatgcacaaagaagaattctagatcaagaaacattttttagtagaggtctaagtagaccgttaatgaaaaacacatatctatttgataattacgcgtatggatggataccagaaactgcaatttggagtagtagatacgcaaacctagatgctagtgactattatcccatttcgttgggattacttaaaaagttcgagtttctcatgtctctatataaaggtcctattcccgtatatgaagaaaaagtaaatactgaattcatagccaatggatcgttctctggtagatacgtatcatatcttcgaaagttttctgcccttccaacaaacgagtttattagttttttgttactgacttccattccaatctataatatcttgttctggtttaaaaacacacagtttgatattactaaacacacattattcagatacgtctatacagataatgccaaacacctggcgttggctaggtatatgcatcaaacaggagactataagcctttgtttagtcgtctcaaagagaattatatatttaccggtcccgttccaataagtatcaaagatatagatcaccctaatcttagtagagcaagaagtccatccgattatgagacattagctaatattagtactatattgtactttaccaagtatgatccggtattaatgtttttattgttttacgtacctgggtattcaattactacaaaaattactccagccgtagaatatctaatggataaactgaatctaacaaagagcgacgtacaactgttgtaaattattttatgcttcgtaaaatgtaggttttgaaccaaacattctttcaaagaatgagatgcataaaactttattatccaatagattgactatttcggacgtcaatcgtttaaagtaaacttcgtaaaatattctttgatcactgccgagtttaaaacttctatcgataattgtctcatatgttttaatatttacaagttttttggtccatggtacattagccggacaaatatatgcaaaataatatcgttctccaagttctatagtttctggattatttttattatattcagtaactaaatacatattagggttatctgcggatttataatttgagtgatgcattctactcaacataaataattctagaggagacgatctactatcaaattcggatcgtaaatctgtttctaaagaacggagaatatctatacatacctgattagaattcatccgtccttcagacaacatctcagacagtctggttttgtacatcttaatcatattcttatgaaacttggaaacatctcttctagtttcactagtacctttattaattctctcaggtacagattttgaattcgacgatgctgagtatttcatcgttgtatatttcttcttcgattgcataatcagattcttatataccgcctcaaactctattttaaaattattaaacaatactctattattaatcagtcgttctaactctttcgctatttctatagacttatctacatcttgactgtctatctctgtaaacacggagtcggtatctccatacacgctacgaaaacgaaatctgtaatctataggcaacgatgttttcacaatcggattaatatctctatcgtccatataaaatggattacttaatggattggcaaaccgtaacataccgttagataactctgctccatttagtaccgattctagatacaagatcattctacgtcctatggatgtgcaactcttagccgaagcgtatgagtatagagcactatttctaaatcccatcagaccatatactgagttggctactatcttgtacgtatattgcatggaatcatagatggccttttcagttgaactggtagcctgttttagcatctttttatatctggctctctctgccaaaaatgttcttaatagtctaggaatggttccttctatcgatctatcgaaaattgctatttcagagatgaggttcggtagtctaggttcacaatgaaccgtaatatatctaggaggtggatatttctgaagcaatagctgattatttatttcttcttccaatctattggtactaacaacgacaccgactaatgtttccggagatagatttccaaagatacacacattaggatacagactgttataatcaaagattaatacattattactaaacattttttgttttggagcaaataccttaccgccttcataaggaaacttttgttttgtttctgatctaactaagatagttttagtttccaacaatagctttaacagtggacccttgatgactgtactcgctctatattcgaataccatggattgaggaagcacatatgttgacgcacccgcgtctgtttttgtttctactccataatactcccacaaatactgacacaaacaagcatcatgaatacagtatctagccatatctaaagctatgtttagattataatccttatacatctgagctaaatcaacgtcatcctttccgaaagataatttatatgtatcattaggtaaagtaggacataatagtacgactttaaatccattttcccaaatatctttacgaattactttacatataatatcctcatcaacagtcacataattacctgtggttaaaacctttgcaaatgcagcggctttgcctttcgcgtctgtagtatcgtcaccgatgaacgtcatttctctaactcctctatttaatactttacccatgcaactgaacgcgttcttggatatagaatccaatttgtacgaatccaatttttcaaatttttgaatgaatgaatatagatcgaaaaatatagttccattattgttattaacgtgaaacgtagtattggccatgccgcctactcccttatgactagactgatttctctcataaatacagagatgtacagcttcctttttgtccggagatctaaagataattttctctcctgttaataactctagacgattagtaatatatctcagatcaaagttatgtccgttaaaggtaacgacgtagtcgaacgttagttccaacaattgtttagctattcgtaacaaaactatttcagaacatagaactagttctcgttcgtaatccatttccattagtgactgtatcctcaaacatcctctatcgacggcttcttgtatttcctgttccgttaacatctcttcattaatgagcgtaaacaataatcgtttaccacttaaatcgatataacagtaacttgtatgcgagattgggttaataaatacagaaggaaacttcttatcgaagtgacactctatatctagaaataagtacgatcttgggatatcgaatctaggtatttttttagcgaaacagttacgtggatcgtcacaatgataacatccattgttaatctttgtcaaatattgctcgtccaacgagtaacatccgtctggagatatcccgttagaaatataaaaccaactaatattgagaaattcatccatggtggcattttgtatgctgcgtttctttggctcttctatcaaccacatatctgcgacggagcattttctatctttaatatctagattataacttattgtctcgtcaatgtctatagttctcatctttcccaacggcctcgcattaaatggaggaggagacaatgactgatatatttcgtccgtcactacgtaataaaagtaatgaggaaatcgtataaatacggtctcgccatttcgacatctggatttcagatataaaaatctgttttcaccgtgactttcaaaccaattaatgcaccgaacatccatttatagaatttagaaatatattttcatttaaatgaatcccaaacattggggaagagccgtatggaccattatttttatagtactttcgcaagcgggtttagacggcaacatagaagcgtgtaaacgaaaactatatactatagttagcactcttccatgtcctgcatgtagacggcacgcgactatcgctatagaggacaataatgtcatgtctagcgatgatctgaattatatttattattttttcatcagattatttaacaatttggcatctgatcccaaatacgcgatcgatgtgacaaaggttaaccctttataaacttaacccattataaaacttatgattagtcacaactgaaataaccgcgtgattattttttggtataattctacacggcatggtttctgtgactatgaattcaacccccgttacattagtgaaatctttaacaaacagcaagggttcgtcaaagacataaaactcattgtttacaatcgaaatagaccccctatcacacttaaaataaaaaatatccttatcctttaccaccaaataaaattctgattggtcaatgtgaatgtattcacttaacagttccacaaatttatttattaactccgaggcacatacatcgtcggtattttttatggcaaactttactcttccagcatccgtttctaaaaaaatattaacgagttccatttatatcatccaatattattgaaatgacgttgatggacagatgatacaaataagaaggtacggtacctttgtccaccatctcctccaattcatgctctattttgtcattaactttaatgtatgaaaacagtacgccacatgcttccatgacagtgtgtaacactttggatacaaaatgtttgacattagtataattgtccaagactgtcaatctataatagatagtagctataatatattctatgatggtattgaagaagatgacaaccttggcatattgatcatttaacacagacatggtatcaacagatagcttgaatgaaagagaatcagtaattggaataagcgtcttctcgatagagtgtccgtataccaacatgtctgatattttgatgtattccattaaattatttagttttttctttttattctcgttaaacagcatttctgtcaacggaccccaacatcgttgaccgattaagttttgattgatttttccgtgtaaggcgtatctagtcagatcgtatagcctatccaataatccatcgtctgtgtgtagatcacatcgtacactttttaattctctatagaagagcgacagacatctggagcaattacagacagcaatttctttattctctacagatgtaagatacttgaagacattcctatgatgatgcagaattttggataacacggtattgatggtatctgttaccataattcctttgatggctgatagtgtcagagcacaagatttccaatctttgacaatttttagcaccattatctttgttttgatatctatatcagacagcatggtgcgtctgacaacacagggattaagacggaaagatgaaatgattctctcaacatcttcaatagataccttgctattttttctggcattatctatatgtgcgagaatatcctctagagaatcagtatcctttttgatgatagtggatctcaatgacatgggacgtttaaaccttcttattctatcaccagattgcatggtgatttgtcttctttcttttatcataatgtaatctctaaattcatcggcaaattgtctatatctaaaatcataatatgagatgtttacctctacaaatatctgttcgtccaatgttagagtatttacatcagttttgtattccaaattaaacatggcaacggatttaattttatattcctctattaagtcctcgtcgataataacagaatgtagataatcatttaatccgtcgtacatggttggaagatgcttgttgacaaaatctttaattgtcttgatgaaggtgggactatatctaacatcttgattaataaaatttataacattgtccataggatactttgtaactagttttatacacatctcttcatcggtaagtttagacagaatatcgtgaacaggtggtatattatattcatcagatatacgaagaacaatgtccaaatctatattgtttaatatattatatagatgtagcgtagctcctacaggaatatctttaactaagtcaatgatttcatcaaccgttagatctattttaaagttaatcatataggcattgatttttaaaaggtatgtagccttgactacattctcattaattaaccattccaagtcattgtgtgtaagaagattatattctatcataagcttgactacatttggtcccgataccattaaagaattcttatgatataaggaaacagattttaggtactcatctactctacaagaattttggagagccttaacgatatcagtgacgtttattatttcaggaggaaagaatctaacattgagaatatcggaattaatagcttccagatacagtgattttggcaatagtccgtgtaatccataatccagtaacacgagctggtgcttgctagacaccttttcaatgtttaatttttttgaaataagctttgataaagccttcctcgcaaattccggatacatgaacatgtcggcgacatgattaagtattgttttttcattatttttatattttctcaacaagttctcaataccccaatagatgatagaatatcacccaatgcgtccatgttgtctatttccaacaggtcgctatatccaccaatagaagtttttccaaaaaagattctaggaacagttctaccaccagtaatttgttcaaaataatcccgcaattcattttcgggtttaaattctttaatatcgacaatttcatacgctcctcttttgaaactaaacttatttagaatatccagtgcatttctacaaaaaggacatgtatacttgacaaaaattgtcactttgttattggccaacctttgttgtacaaattcctcggccattttaatatttaagtgatataaaactatctcgacttatttaactctttagtcgagatatatggacgcagatagctatatgatagccaactacagaaggcaaacgctataaaaaacataattacgacgagcatatttataaatatttttattcagcattacttgatatagtaatattaggcacagtcaaacattcaaccactctcgatacattaactctctcattttctttaacaaattctgcaatatcttcgtaaaaagattcttgaaactttttagaatatctatcgactctagatgaaatagcgttcgtcaacatactatgttttgtatacataaaggcgcccattttaacagtttctagtgacaaaatgctagcgatcctaggatcctttagaatcacatagattgacgattcgtctctcttagtaactctagtaaaataatcatacaatctagtacgcgaaataatattatccttgacttgaggagatctaaacaatctagttttgagaacatcgataagttcatcgggaatgacatacatactatctttaatagaactcttttcatccagttgaatggattcgtccttaaccaactgattaatgagatcttctattttatcattttccagatgatatgtatgtccattaaagttaaattgtgtagcgcttctttttagtctagcagccaatactttaacatcactaatatcgatatacaaaggagatgatttatctatggcattaagaattcgtttttcgacatccgtcaaaaccaattcctttttgcctgtatcatccagttttccatcctttgtaaagaaattattttctactagactattaataagactgataaggattcctccataattgcacaatccaaactttttaacaaaactagactttacgagatctacaggaatgcgtacttcaggttttttagcttgtgattttttcttttgcggacattttctagtaaccaactcatctaccatttcattgattttagcagtgaaataagctttcaatgcacgggcactgatactattgaaaacgagttgatcttcaaattccgccatttaagttcaccaaacaacttttaaatacaaatatatcaatagtagtagaataagaactataaaaaaaataataattaaccaaccccaacaaccggtattattagttgatgtggtagttttctcatcacttagaacagatttaacaatttctataaagtctgtcaaatcatcttccggagaccccataaatacaccaaatatagcggcgtacaacttatccatttatacattgaatattggcttttctttatcgctatcttcatcatattcatcatcaatatcaacaagtcccagattacgagccagatcttcttctacattttcagtcattgatacacgttcactatctccagagagtccgataacgttagccaccacttctctatcaatgattagtttcttgagcgcgaaagtaatttttgtttccgttccggatctatagaagacgataggtgtgataattgccttggccaattgtctttctcttttactgagtgattctagttcaccttctatagatctgagaatggatgattctccagtcgaaacatattctaccatggatccgtttaatttgttgatgaagatggattcatccttaaatgttttctctgtaatagtttccaccgaaagactatgcaaagaatttggaatgcgttccttgtgcttaatgtttccatagacggcttctagaagttgatacaacataggactagccgcggtaacttttatttttagaaagtatccatcgcttctatcttgtttagatttatttttataaagtttagtctctccttccaacataataaaagtggaagtcatttgactagataaactatcagtaagttttatagagatagacgaacaattagcgtattgagaagcatttagtgtaacgtattcgatacattttgcattagatttactaatcgattttgcatactctataacacccgcacaagtctgtagagaatcgctagatgcagtaggtcttggtgaagtttcaactctcttcttgattaccttactcatgattaaacctaaataattgtactttgtaatataatgatatatattttcactttatctcatttgagaataaaaatgtttttgtttaaccactgcatgatgtacagatttcggaatcgcaaaccaccagtggttttattttatccttgtccaatgtgaattgaatgggagcggatgcgggtttcgtacgtagatagtacattcccgtttttagaccgagactccatccgtaaaaatgcatactcgttagtttggaataactcggatctgctatatggatattcatagattgactttgatcgatgaaggctcccctgtctgcagccatttttatgatcgtcttttgtggaatttcccaaatagttttataaactcgcttaatatcttctggaaggtttgtattctgaatggatccaccatctgccataatcctattcttgatctcatcattccataattttctctcggttaaaactctaaggagatgcggattaactacttgaaattctccagacaatactctccgagtgtaaatattactggtatacggttccaccgactcattatttcccaaaatttgagcagttgatgcagtcggcataggtgccaccaataaactatttctaagaccgtatgttctgattttatcttttagaggttcccaattccaaagatccgacggtacaacattccaaagatcatattgtagaataccgttactggcgtacgatcctacatatgtatcgtatggtccttccttctcagctagttcacaactcgcctctaatgcaccgtaataaatggtttcgaagatcttcttatttagatcttgtgcttccaggctatcaaatggataatttaagagaataaacgcgtccgctaatccttgaacaccaataccgataggtctatgtctcttattagagatttcagcttctggaataggataataattaatatctataattttattgagatttctgacaattactttgaccacatccttcagtttgagaaaatcaaatcgcccatctattacaaacatgttcaaggcaacagatgccagattacaaacggctacctcattagcatccgcatattgtattatctcagtgcaaagattactacacttgatagttcctaaattttgttgattactctttttgttacacgcatccttataaagaatgaatggagtaccagtttcaatctgagattctataatcgctttccagacgactcgagcctttattatagatttgtatctcctttctctttcgtatagtgtatacaatcgttcgaactcgtctccccaaacattgtccaatccaggacattcatccggacacatcaacgaccactctccgtcatccttcactcgtttcataaagagatcaggaatccaaagagctataaatagatctctggttctatgttcctcgtttcctgtattctttttaagatcgaggaacgccataatatcagaatgccacggttccaagtatatggccataactccaggccgtttgtttcctccctgatctatgtatctagcggtgttattataaactctcaacattggaataataccgtttgatataccattggtaccggagatatagcttccactggcacgaatattactaattgatagacctattccccctgccattttagagattaatgcgcatcgttttaacgtgtcatagataccctctatgctatcatcgatcatgttaagtagaaaacagctagacatttggtgacgactagttcccgcattaaataaggtaggagaagcgtgcgtaaaccatttttcagaaagtagattgtacgtctcaatagctgagtctatatcccattgatgaattcctactgcgacacgcattaacatgtgctgaggtctttcaacgatcttgttgtttattttcaacaagtaggatttttccaaagttttaaaaccaaaatagttgtatgaaaagtctcgttcgtaaataataaccgagttgagtttatccttatatttgttaactatatccatggtgatacttgaaataatcggagaatgtttcccatttttaggattaacatagttgaataaatcctccatcacttcactaaatagtttttttgtttccttgtgtagatttgatacggctattctggcggctagaatggcataatccggatgttgtgtagtacaagtggctgctatttcggctgccagagtgtccaattctaccgttgttactccattatatattccttgaataaccttcatagctattttaataggatctatatgatccgtgtttaagccataacataattttctaatacgagacgtgattttatcaaacatgacattttccttgtatccatttcgtttaatgacaaacatttttgttggtgtaataaaaaaattatttaacttttcattaatagggatttgacgtatgtagcgtacaaaatgattgttcctggtatatagataaagagtcctatatatttgaaaatcgttacggctcgattaaactttaatgattgcatagtgaatatatcattaggatttaactccttgactatcatggcggcgccagaaattaccatcaaaagcattaatacagttataccgatcgcagttagaacggttatagcatccaccatttatatctaaaaattagatcaaagaatatgtgacaaagtcctagttgtatactgagaattgacgaaacaatgtttcttacatatttttttcttattagtaaccgacttaatagtaggaactggaaaactagacttgattattctataagtatagatacccttccaaataatattctctttgataaaagttccagaaaatgtagaattttttaaaaagttatcttttgctattaccaagattgtgtttagacgcttattattaatatgagtgatgaaatccacaccgcctctagatatcgcctttatttccacattagatggtaaatccaatagtgaaactatctttttaggaatgtatggactcgcgtttagaggagtaaacgtcttaggcgtcggaaaggatgattcatcaaacgaataaacaatttcacaaatggatgttaatgtattagtaggaaattttttgacgctattggaattgaagattctaatggatgatgttctacctatttcatccgataacatgttaatttccgacaccaacggttttaatatttcgatgatatacggtagtctctctttcggacttatatagcttattccacaatacgagtcattatatactccaaaaaacaaaataactagtataaaatctgtatcgaatgggaaaaacgaaattatcgacataggtatagaatccggaacattgaacgtattaatacttaattctttttctgtggtaagtaccgataggttattgacattgtatggttttaaatattctataacttgagacttgatagatattagtgatgaattgaaaattatttttatcaccacgtgtgtttcaggatcatcgtcgacgcccgtcaaccaaccgaacggagtaaaataaatatcattaatatatgctctagatattagtatttttatcaatcctttgattatcatcttctcgtaggcgaatgattccatgatcaagagtgatttaagaacatcctccggagtattaatgggcttagtaaacagtccatcgttgcaataataaaagttatccaagttaaaggatattatgcattcgtttaaagatatcacctcatctgacggagacaattttttggtaggttttagagactttgaagctacttgtttaacaaagttattcatcgtcgtctactattctatttaattttgtagttaatttatcacatatcacattaattgactttttggtccacttttccatacgtttatattcttttaatcctgcgttatccgtttccgttatatccagggatagatcttgcaagttaaatagaatgctcttaaataatgtcattttcttatccgctaaaaatttaaagaatgtataaacctttttcagagatttgaaactcttaggtggtgtcctagtacacaatatcataaacaaactaataaacattccacattcagattccaacagctgattaacttccacattaatacagcctattttcgctccaaatgtacattcgaaaaatctgaataaaacatcgatgtcacaatttgtattatccaatacagaatgtttgtgattcgtgttaaaaccatcggagaaggaatagaaataaaaattattatagtggtggaattcagttggaatattgcctccggagtcataaaaggatactaaacattgttttttatcataaattacacatttccaatgagacaaataacaaaatccaaacattacaaatctagaggtagaacttttaattttgtctttaagtatatacgataagatatgtttattcataaacgcgtcaaatttttcatgaatcgctaaggagtttaagaatctcatgtcaaattgtcctatataatccacttcggatccataagcaaactgagagactaagttcttaatacttcgattgctcatccaggctcctctctcaggctctattttcatcttgacgacctttggattttcaccagtatgtattcctttacgtgataaatcatcgattttcaaatccatttgtgagaagtctatcgccttagatactttttcccgtagtcgaggtttaaaaaaatacgctaacggtatactagtaggtaactcaaagacatcatatatagaatggtaacgcgtctttaactcgtcggttaactctttcttttgatcgagttcgtcgctactattgggtctgctcaggtgccccgactctactagttccaacatcataccgataggaatacaagacactttgccggcggttgtagatttatcatatttttccactacatatccgttacaatttgttaaaaatttagatacatctatattgctacataatccagctagtgaatatatatgacataataaattggtaaatcctagttctggtattttactaattactaaatctgtatatctttccatttatcatggaaaagaatttaccagatatcttcttttttccaaactgcgttaatgtattctcttacaaatattcacaagatgaattcagtaatatgagtaaaacggaacgtgatagtttctcattggccgtgtttccagttataaaacatagatggcataacgcacacgttgtaaaacataaaggaatatacaaagttagtacagaagcacgtggaaaaaaagtatctcctccatcactaggaaaacccgcacacataaacctaaccgcgaagcaatatatatacagtgaacacacaataagctttgaatgttatagttttctaaaatgtataacaaatacagaaatcaattcgttcgatgagtatatattaagaggactattagaagctggtaatagtttacagatattttccaattccgtaggtaaacgaacagatactataggtgtactagggaataagtatccatttagcaaaattccattggcctcattaactcctaaagcacaacgagagatattttcagcgtggatttctcatagacctgtagttttaactggaggaactggagtgggtaagacgtcacaggtacccaagttattgctttggtttaattatttatttggtggattctctactctagataaaatcactgactttcacgaaagaccagtcattctatctcttcctaggatagctttagttagattgcatagcaataccattttaaaatcattgggatttaaggtactagatggatctcctatttctttacggtacggatctataccggaagaattaataaacaaacaaccaaaaaaatatggaattgtattttctacccataagttatctctaacaaaactatttagttatggcactcttattatagacgaagttcatgagcatgatcaaataggagatattattatagcagtagcgagaaagcatcatacgaaaatagattctatgtttttaatgactgccacgttagaggatgacagggaacggctaaaagtatttttacctaatcccgcatttatacatattcctggagatacactgtttaaaattagcgaggtatttattcataataagataaatccatcttccagaatggcatacatagaagaagaaaagagaaatttagttactgctatacagatgtatactcctcctgatggatcatccggtatagtctttgtggcatccgttgcacagtgtcacgaatataaatcatatttagaaaaaagattaccgtatgatatgtatattattcatggtaaggtcttagatatagacgaaatattagaaaaagtgtattcatcacctaatgtatcgataattatttctactccttatttggaatccagcgttactatacgcaatgttacacacatttatgatatgggtagagtttttgtccccgctccttttggaggatcgcaacaatttatttctaaatctatgagagatcaacgaaaaggaagagtaggaagagttaatcctggtacatacgtctatttctatgatctgtcttatatgaagtctatacagcgaatagattcagaatttctacataattatatattgtacgctaataagtttaatctaacactccccgaagatttgtttataatccctacaaatttggatattctatggcgtacaaaggaatatatagactcgttcgatattagtacagaaacatggaataaattattatccaattattatatgaagatgatagagtatgctaaactttatgtactaagtcctattctcgctgaggagttggataactttgagaggacgggagaattaactagtattgtacgagaagccattttatctctaaatttacaaattaagattttaaattttaaacataaagatgatgatacgtatatacacttttgtaaaatattattcggtgtctataacggaacaaacgctactatatattatcatagacctctaacgggatatatgaatatgatttcagatactatatttgttcctgtagataataactaaaaatcaaactctaatgaccacatctttttttagagatgaaaaattttccacatctccttttgtagacacgactaaacattttgcagaaaaaagtttattagtgtttagataatcgtatacttcatcagtgtagatagtaaatgtgaacagataaaaggtattcttgctcaatagattggtaaattccatagaatatattaatcctttcttcttgagatcccacatcatttcaaccagagacgttttatccaatgatttacctcgtactataccacatacaaaactagattttgcagtgacgtcgtacctggtattcctaccaaacaaaattttacttttagttcttttagaaaattctaaggtagaatctctatttgccaatatgtcatctatggaattaccactagcaaaaaatgatagaaatatatattgatacatcgcagctggttttgatctactatactttaaaaacgaatcagattccataattgcctgtatatcatcagctgaaaaactatgttttacacgtattccttcggcatttctttttaatgatatatcttgtttagacaatgataaagttatcatgtccatgagagacgcgtctccgtatcgtataaatatttcattagatgttagacgcttcattaggggtatacttctataaggtttcttaatcagtccatcattggttgcgtcaagaactactatcggatgttgttgggtatctctagtgttacacatggccttactaaagtttgggtaaataactatgatatctctattaattatagatgcatatatttcattcgtcaaggatattagtatcgacttgctatcgtcattaatacgtgtaatgtaatcatataaatcatgcgatagccaaggaaaatttaaatagatgttcatcatataatcgtcgctataattcatattaatacgttgacattgactaatttgtaatatagcctcgccacgaagaaagctctcgtattcagtttcatcgataaaggataccgttaaatataactggttgccgatagtctcatagtctattaagtggtaagtttcgtacaaatacagaatccctaaaatattatctaatgttggattaatctttaccataactgtataaaatggagacggagtcataactattttaccgtttgtacttactggaatagatgaaggaataatctccggacatgctggtaaagacccaaatgtctgtttgaagaaatccaatgttccaggtcctaatctcttaacaaaaattacgatattcgatcccgatatcctttgcattctatttaccagcatatcacgaactatattaagattatctatcatgtctattctcccaccgttatataaatcgcctccgctaagaaacgttagtatatccatacaatggaatacttcatttctaaaatagtattcgttttctaattctttaatgtgaaatcgtatactagaaagggaaaaattatctttgagttttccgttagaaaagaaccacgaaactaatgttctgattgcgtccgattccgttgctgaattaatggatttacaccaaaaactcatataacttctagatgtagaagcattcgctaaaaaattagtagaatcaaaggatataagtagatgttccaacaagtgagcaattcccaagatttcatctatatcattctcgaatccgaaattagaaattcccaagtagatatcctttttcatccgatcgttgatgaaaatacgaactttattcggtaagacaatcatttactaaggagtaaaataggaagtaatgttcgtatgtcgttatcatcgtataaattaaaggtgtgttttttaccattaagtgacattataattttaccaatattggaattataatataggtgtatttgcgcactcgcgacggttgatgcatcggtaaatatagctgtatctaatgttctagtcggtatttcatcatttcgctgtctaataatagcgttttctctatctgtttccattacagctgcctgaagtttattggtcggataatatgtaaaataataagaaatacatacgaataacaaaaataaaataagatataataaagatgccatttagagatctaattttgtttaacttgtccaaattcctacttacagaagatgaggaatcgttggagatagtgtcttccttatgtagaggatttgaaatatcttataatgacttgataacttactttccagataggaaataccataaatatatttataaagtatttgaacatgtagatttatcggaggaattaagtatggaattccatgatacaactctgagagatttagtctatcttagattgtacaagtattccaagtgtatacggccgtgttataaattaggagataatctaaaaggcatagttgttataaaggacaggaatatttatattagggaagcaaatgatgacttgatagaatatctcctcaaggaatacactcctcagatttatacatattctaatgagcgcgtccccataactggttcaaaattaattctttgtggattttctcaagttacatttatggcgtatacaacgtcgcatataacaacaaataaaaaggtagatgttctcgtttccaaaaaatgtatagatgaactagtcgatccaataaattatcaaatacttcaaaatttatttgataaaggaagcggaacaataaacaaaatactcaggaagatattttattcggtaacaggtggccaaactccataggtagctttttctatttcggattttagaatttccaaattcaccagcgatttatcggttttggtgaaatccaaggatttattaatgtccacaaatgccatttgttttgtctgtggattgtatttgaaaatggaaacgatgtagttagatagatgcgctgcgaagtttcctattagggttccgcgcttcacgtcacccagcatacttgaatcaccatcctttaaaaaaaatgataagatatcaacatggagtatatcatactcgaattttaattcttctactgactcactgacattttcacaaatactacaatacggtttaccgaaaataatcagtacgttcttcatttatgggtatcaaaaacttaaaatcgttactgctggaaaataaatcactgacgatattagatgataatttatacaaagtatacaatggaatatttgtggatacaatgagtatttatatagccgtcgccaattgtgtcagaaacttagaagagttaactacggtattcataaaatacgtaaacggatgggtaaaaaagggagggcatgtaaccctttttatcgatagaggaagtataaaaattaaacaagacgttagagacaagagacgtaaatattctaaattaaccaaggacagaaaaatgttagaattagaaaagtgtacatccgaaatacaaaatgttaccggatttatggaagaagaaataaaggcagaaatgcaattaaaaatcgataaactcacatttcaaatatatttatctgattctgataacataaaaatatcattgaatgagatactaacacatttcaacaataatgagaatgttacattattttattgtgatgaacgagacgcagaattcgttatgtgtctcgaggctaaaacacatttctctaccacaggagaatggccgttgataataagtaccgatcaggatactatgctatttgcatctgctgataatcatcctaagatgataaaaaacttaactcaactgtttaaatttgttccctcggcagaggataactatttagcaaaattaacggcgttagtgaatggatgtgatttctttcctggactctatggggcatctataacacccaccaacttaaacaaaatacaattgtttagtgattttacaatcgataatatagtcactagtttggcaattaaaaattattatagaaagactaactctaccgtagacgtgcgtaatattgttacgtttataaacgattacgctaatttagacgatgtctactcgtatattcctccttgtcaatgcactgttcaagaatttatattttccgcattagatgaaaaatggaatgaatttaaatcatcttatttagaaagcgtgccgttaccctgccaattaatgtacgcgttagaaccacgcaaggagattgatgtttcagaagttaaaactttatcatcttatatagatttcgaaaatactaaatcagatatcgatgttataaaatctatatcctcgatcttcggatattctaacgaaaactgtaacacgatagtattcggcatctataaggataatttactactgagtataaataattcattttactttaacgatagtctgttaataaccaatactaaaagtgataatataataaatataggttactagattaaaaatggtgttccaactcgtgtgctctacatgcggtaaagatatttctcacgaacgatataaattgattatacgaaaaaaatcattaaaggatgtactcgtcagtgtaaagaacgaatgttgtaggttaaaattatctacacaaatagaacctcaacgtaacttaacagtgcaacctctattggatataaactaatatggatccggttaattttatcaagacatatgcgcctagaggttctattatttttattaattataccatgtcattaacaagtcatttgaatccatcgatagaaaaacatgtgggtatttattatggtacgttattatcggaacacttggtagttgaatctacctatagaaaaggagttcgaatagtcccattggatagtttttttgaaggatatcttagtgcaaaagtatacatgttagagaatattcaagttatgaaaatagcagctgatacgtcattaactttattgggtattccgtatggatttggtcatgatagaatgtattgttttaaattggtagctgactgttataaaaatgccggtattgatacatcgtctaaacgaatattgggcaaagatatttttctgagccaaaacttcacagacgataatagatggataaagatatatgattctaataatttaacattttggcaaattgattaccttaaagggtgagttaatatgcataactactcctccgttgttttttccctcgttctttttcttaacgttgtttgccatcactctcataatgtaaagatattctaaaatggtaaacttttgcatatcggacgcagaaattggtataaatgttgtaattgtattatttcccgtcaatggactagtcacagctccatcagttttatatcctttagagtatttctcactcgtgtctaacattctagagcattccatgatctgtttatcgttgatattggccggaaagatagattttttattttttattatattactattggcaattgtagatataacttctggtaaatatttttctaccttttcaatctcttctattttcaagccggctatatattctgctatattgttgctagtatcaataccttttctggctaagaagtcatatgtggtattcactatatcagttttaactggtagttccattagcctttccacttctgcagaataatcagaaattggttctttaccagaaaatccagctactataataggctcaccgatgatcattggcaaaatcctatattgtaccagattaatgagagcatatttcatttccaataattctgctagttcttgagacattgatttatttgatgaatctagttggttctctagatactctaccatttctgccgcatacaataacttgttagataaaatcagggttatcaaagtgtttagcgtggctagaatagtgggcttgcatgtattaaagaatgcggtagtatgagtaaaccgttttaacgaattatatagtctccagaaatctgtggcgttacatacatgagccgaatgacatcgaagattgtccaatatttttaatagctgctctttgtccattatttctatatttgactcgcaacaattgtagataccattaatcaccgattcctttttcgatgccggacaatagcacaattgtttagctttggactctatgtattcagaattaatagatatatctctcaatacagattgcactatacattttgaaactatgtcaaaaattgtagaacgacgctgttctgcagccatttaactttaaataatttacaaaaatttaaaatgagcatccgtataaaaatcgataaactgcgccaaattgtggcatatttttcagagttcagtgaagaagtgtctataaatgtagactcgacggatgagttaatgtatatttttgccgccttgggcggatctgtaaacatttgggcaattatacctctaagtgcatcagtgttttaccgaggagccgaaaatattgtgtttaatcttcctgtgtccaaggtaaaatcgtgtttgtgtagttttcacaatgatgccatcatagatatagaacctgatctggaaaataatctagtaaaactttctagttatcatgtagtaagtgtcgattgtaacaaggaactgatgcctattaggacagatactactatttgtctaagtatagatcaaaagaaatcttacgtgtttaattttcacaagtatgaagaaaaatgttgtggtagaaccgtcattcatctagaatggttgttgggctttatcaagtgtattagtcagcatcagcatctggctattatgtttaaagatgacaatattattatgaagactcctggtaatactgatgcgttttccagggaatattctatgactgaatgttctcaagaactacaaaagttttctttcaaaatagctatctcgtctctcaacaaactacgaggattcaaaaagagagtcaatgtttttgaaactagaatcgtaatggataatgacgataacattttaggaatgttgttttcggatagagttcaatcctttaagatcaacatctttatggcgtttttagattaatactttcaatgagataaatatgggtggcggagtaagtgttgagctccctaaacgggatccgcctccgggagtacccactgatgagatgttattaaacgtggataaaatgcatgacgtgatagctcccgctaagcttttagaatatgtgcatataggaccactagcaaaagataaagaggataaagtaaagaaaagatatccagagtttagattagtcaacacaggacccggtggtctttcggcattgttaagacaatcgtataatggaaccgcacccaattgctgtcgcacttttaatcgtactcattattggaagaaggatggaaagatatcagataagtatgaagagggtgcagtattagaatcgtgttggccagacgttcacgacactggaaaatgcgatgttgatttattcgactggtgtcagggggatacgttcgatagaaacatatgccatcagtggatcggttcagcctttaataggagtaatagaactgtagagggtcaacaatcgttaataaatctgtataataagatgcaaacattatgtagtaaagatgctagtgtaccaatatgcgaatcatttttgcattatttacgcgcacacaatacagaagatagcaaagagatgatcgattatattctaagacaacagtctgcggactttaaacagaaatatatgagatgtagttatcccactagagataagttagaagagtcattaaaatatgcggaacctcgagaatgttgggatccagagtgttcgaatgccaatgttaatttcttactaacacgtaattataataatttaggactttgcaatattgtacgatgtaataccagcgtgaacaacttacagatggataaaacttcctcattaagattgtcatgtggattaagcaatagtgatagattttctactgttcccgtcaatagagcaaaagtagttcaacataatattaaacactcgttcgacctaaaattgcatttgatcagtttattatctctcttggtaatatggatactaattgtagctatttaaatgggtgccgcggcaagcatacagacgacggtgaatacactcagcgaacgtatctcgtctaaattagaacaagaagcgaacgctagtgctcaaacaaaatgtgatatagaaatcggaaatttttatatccgacaaaaccatggatgtaacctcactgttaaaaatatgtgctctgcggacgcggatgctcagttggatgctgtgttatcagccgctacagaaacatatagtggattaacaccggaacaaaaagcatacgtgccagctatgtttactgctgcgttaaacattcagacgagtgtaaacactgttgttagagattttgaaaattatgtgaaacagacttgtaattctagcgcggtcgtcgataacaaattaaagatacaaaacgtaatcatagatgaatgttacggagccccaggatctccaacaaatttggaatttattaatacaggatctagcaaaggaaattgtgccattaaagcgttgatgcaattgacgactaaggccactactcaaatagcacctagacaagttgctggtacaggagttcagttttatatgattgttatcggtgttataatattggcagcgttgtttatgtactatgccaagcgtatgttgttcacatccaccaatgataaaatcaaacttattttagccaataaggaaaacgtccattggactacttacatggacacattctttagaacttctccgatggttattgctaccacggatatgcaaaactgaaaatatattgataatattttaatagattaacatggaagttatcgctgatcgtctagacgatatagtgaaacaaaatatagcggatgaaaaatttgtagattttgttatacacggtctagagcatcaatgtcctgctatacttcgaccattaattaggttgtttattgatatactattatttgttatagtaatttatatttttacggtacgtctagtaagtagaaattatcaaatgttgttggtggtgctagtcatcacattaactattttttattactttatactataatagtactagactgacttctaacaaacatctcacctgccataaataaatgcttgatattaaagtcttctatttctaacactattccatctgtggaaaataatactctgacattatcgctaattgacacatcggtgagtgatatgcctataaagtaataatcttctttgggcacatataccagtgtaccaggttctaacaacctatttactggtgctcctgtagcatactttttctttaccttgagaatatccatcgtttgcttggtcaatagcgatatgtgattttttatcaaccactcaaaaaagtaattggagtgttcatatcctctacgggctattgtctcatggccgtgtatgaaatttaagtaacacgactgtggtagatttgttctatagagccgattgccgcaaatagatagaactaccaatatgtctgtacaaatgttaaacattaattgattaacagaaaaaacaatgttcgttctgggaatagaaaccagatcaaaacaaaattcgttagaatatatgccacgtttatacatggaatataaaataactacagtttgaaaaataacagtatcatttaaacatttaacttgcggggttaatctcacaactttactgtttttgaactgttcaaaatatagcatcgatccgtgagaaatacgtttagccgcctttaatagaggaaatcccaccgcctttctggatctcaccaacgacgatagttctgaccagcaactcatttcttcatcatccacctgttttaacatataataggcaggagatagatatccgtcattgcaatattccttctcgtaggcacacaatctaatattgataaaatctccattctcttctctgcatttattatcttgtctcggtggctgattaggctgtggtcttggtttaggccttggtctatcgttgttgaatctattttggtcattaaatctttcatttcttcctggtatatttctatcacctcgtttggttggatttttgtctatattatcgtttgtaacatcggtacgggtattcatttatcacaaaaaaaacttctctaaatgagtctactgctagaaaacctcatcgaagaagataccatattttttgcaggaagtatatctgagtatgatgatttacaaatggttattgccggcgcaaaatccaaatttccaagatctatgctttctatttttaatatagtacctagaacgatgtcaaaatatgagttggagttgattcataacgaaaatatcacaggagcaatgtttaccacaatgtataatataagaaacaatttgggtctaggagatgataaactaactattgaagccattgaaaactatttcttggatcctaacaatgaagttatgcctcttattattaataatacggatatgactgccgtcattcctaaaaaaagtggtaggagaaagaataagaacatggttatcttccgtcaaggatcatcacctatcttgtgcattttcgaaactcgtaaaaagattaatatttataaagaaaatatggaatccgcgtcgactgagtatacacctatcggagacaacaaggctttgatatctaaatatgcgggaattaatgtcctgaatgtgtattctccttccacatccataagattgaatgccatttacggattcaccaataaaaataaactagagaaacttagtactaataaggaactagaatcgtatagttctagccctcttcaagaacccattaggttaaatgattttctgggactattggaatgtgttaaaaagaatattcctctaacagatattccgacaaaggattgattactataaatggagaatgttcctaatgtatactttaatcctgtgtttatagagcccacgtttaaacattctttattaagtgtttataaacacagattaatagttttatttgaagtattcgttgtattcattctaatatatgtattttttagatctgaattaaatatgttcttcatgcctaaacgaaaaatacccgatcctattgatagattacgacgtgctaatctagcgtgtgaagacgataaattaatgatctatggattaccatggatgacaactcaaacatctgcgttatcaataaatagtaaaccgatagtgtataaagattgtgcaaagcttttgcgatcaataaatggatcacaaccagtatctcttaacgatgttcttcgcagatgatgattcattttttaagtatttggctagtcaagatgatgaatcttcattatctgatatattgcaaatcactcaatatctagactttctgttattattattgatccaatcaaaaaataaattagaagctgtgggtcattgttatgaatctctttcagaggaatacagacaattgacaaaattcacagactttcaagattttaaaaaactgtttaacaaggtccctattgttacagatggaagggtcaaacttaataaaggatatttgttcgactttgtgattagtttgatgcgattcaaaaaagaatcctctctagctaccaccgcaatagatcctgttagatacatagatcctcgtcgcaatatcgcattttctaacgtgatggatatattaaagtcgaataaagtgaacaataattaattctttattgtcatcatgaacggcggacatattcagttgataatcggccccatgttttcaggtaaaagtacagaattaattagacgagttagacgttatcaaatagctcaatataaatgcgtgactataaaatattctaacgataatagatacggaacgggactatggacgcatgataagaataattttgaagcattggaagcaactaaactatgtgatgtcttggaatcaattacagatttctccgtgataggtatcgatgaaggacagttctttccagacattgttgaattagatcgataaaaattaattaattacccgggtaccaggcctagatctgtcgagatccggtggtggtgcaaatcaaagaactgctcctcagtggatgttgcctttacttctaggcctgtacggaagtgttacttctgctctaaaagctgctgcagggggggggggggggtgggggggccggttagggccgccatcccctcagagcgtcgggatatcgggtggcggctcgggacggaggacgcgctagtgttcttctgtgtggcagttcagaatgatggatcaagctagatcagcattctctaacttgtttggtggagaaccattgtcatatacccggttcagcctggctcggcaagtagatggcgataacagtcatgtggagatgaaacttgctgtagatgaagaagaaaatgctgacaataacacaaaggccaatgtcacaaaaccaaaaaggtgtagtggaagtatctgctatgggactattgctgtgatcgtctttttcttgattggatttatgattggctacttgggctattgtaaaggggtagaaccaaaaactgagtgtgagagactggcaggaaccgagtctccagtgagggaggagccaggagaggacttccctgcagcacgtcgcttatattgggatgacctgaagagaaagttgtcggagaaactggacagcacagacttcaccagcaccatcaagctgctgaatgaaaattcatatgtccctcgtgaggctggatctcaaaaagatgaaaatcttgcgttgtatgttgaaaatcaatttcgtgaatttaaactcagcaaagtctggcgtgatcaacattttgttaagattcaggtcaaagacagcgctcaaaactcggtgatcatagttgataagaacggtagacttgtttacctggtggagaatcctgggggttatgtggcgtatagtaaggctgcaacagttactggtaaactggtccatgctaattttggtactaaaaaagattttgaggatttatacactcctgtgaatggatctatagtgattgtcagagcagggaaaatcacctttgcagaaaaggttgcaaatgctgaaagcttaaatgcaattggtgtgttgatatacatggaccagactaaatttcccattgttaacgcagaactttcattctttggacatgctcatctggggacaggtgacccttacacacctggattcccttccttcaatcacactcagtttccaccatctcggtcatcaggattgcctaatatacctgtccagacaatctccagagctgctgcagaaaagctgtttgggaatatggaaggagactgtccctctgactggaaaacagactctacatgtaggatggtaacctcagaaagcaagaatgtgaagctcactgtgagcaatgtgctgaaagagataaaaattcttaacatctttggagttattaaaggctttgtagaaccagatcactatgttgtagttggggcccagagagatgcatggggccctggagctgcaaaatccggtgtaggcacagctctcctattgaaacttgcccagatgttctcagatatggtcttaaaagatgggtttcagcccagcagaagcattatctttgccagttggagtgctggagactttggatcggttggtgccactgaatggctagagggatacctttcgtccctgcatttaaaggctttcacttatattaatctggataaagcggttcttggtaccagcaacttcaaggtttctgccagcccactgttgtatacgcttattgagaaaacaatgcaaaatgtgaagcatccggttactgggcaatttctatatcaggacagcaactgggccagcaaagttgagaaactcactttagacaatgctgctttccctttccttgcatattctggaatcccagcagtttctttctgtttttgcgaggacacagattatccttatttgggtaccaccatggacacctataaggaactgattgagaggattcctgagttgaacaaagtggcacgagcagctgcagaggtcgctggtcagttcgtgattaaactaacccatgatgttgaattgaacctggactatgagaggtacaacagccaactgctttcatttgtgagggatctgaaccaatacagagcagacataaaggaaatgggcctgagtttacagtggctgtattctgctcgtggagacttcttccgtgctacttccagactaacaacagatttcgggaatgctgagaaaacagacagatttgtcatgaagaaactcaatgatcgtgtcatgagagtggagtatcacttcctctctccctacgtatctccaaaagagtctcctttccgacatgtcttctggggctccggctctcacacgctgccagctttactggagaacttgaaactgcgtaaacaaaataacggtgcttttaatgaaacgctgttcagaaaccagttggctctagctacttggactattcagggagctgcaaatgccctctctggtgacgtttgggacattgacaatgagttttaaatgtgatacccatagcttccatgagaacagcagggtagtctggtttctagacttgtgctgatcgtgctaaattttcagtagggctacaaaacctgatgttaaaattccatcccatcatcttggtactactagatgtctttaggcagcagcttttaatacagggtagataacctgtacttcaagttaaagtgaataaccacttaaaaaatgtccatgatggaatattcccctatctctagaattttaagtgctttgtaatgggaactgcctctttcctgttgttgttaatgaaaatgtcagaaaccagttatgtgaatgatctctctgaatcctaagggctggtctctgctgaaggttgtaagtggtcgcttactttgagtgatcctccaacttcatttgatgctaaataggagataccaggttgaaagaccttctccaaatgagatctaagcctttccataaggaatgtagctggtttcctcattcctgaaagaaacagttaactttcagaagagatgggcttgttttcttgccaatgaggtctgaaatggaggtccttctgctggataaaatgaggttcaactgttgattgcaggaataaggccttaatatgttaacctcagtgtcatttatgaaaagaggggaccagaagccaaagacttagtatattttcttttcctctgtcccttcccccataagcctccatttagttctttgttatttttgtttcttccaaagcacattgaaagagaaccagtttcaggtgtttagttgcagactcagtttgtcagactttaaagaataatatgctgccaaattttggccaaagtgttaatcttaggggagagctttctgtccttttggcactgagatatttattgtttatttatcagtgacagagttcactataaatggtgtttttttaatagaatataattatcggaagcagtgccttccataattatgacagttatactgtcggttttttttaaataaaagcagcatctgctaataaaacccaacagatactggaagttttgcatttatggtcaacacttaagggttttagaaaacagccgtcagccaaatgtaattgaataaagttgaagctaagatttagagatgaattaaatttaattaggggttgctaagaagcgagcactgaccagataagaatgctggttttcctaaatgcagtgaattgtgaccaagttataaatcaatgtcacttaaaggctgtggtagtactcctgcaaaattttatagctcagtttatccaaggtgtaactctaattcccattttgcaaaatttccagtacctttgtcacaatcctaacacattatcgggagcagtatcttccataatgtataaagaacaaggtagtttttacctaccacagtgtctgtatcggagacagtgatctccatatgttacactaagggtgtaagtaattatcgggaacagtgtttcccataattttcttcatgcaatgacatcttcaaagcttgaagatcgttagtatctaacatgtatcccaactcctataattccctatcttttagttttagttgcagaaacattttgtggtcattaagcattgggtgggtaaattcaaccactgtaaaatgaaattactacaaaatttgaaatttagcttgggtttttgttacctttatggtttctccaggtcctctacttaatgagatagtagcatacatttataatgtttgctattgacaagtcattttaactttatcacattatttgcatgttacctcctataaacttagtgcggacaagttttaatccagaattgaccttttgacttaaagcagagggactttgtatagaaggtttgggggctgtggggaaggagagtcccctgaaggtctgacacgtctgcctacccattcgtggtgatcaattaaatgtaggtatgaataagttcgaagctccgtgagtgaaccatcattataaacgtgatgatcagctgtttgtcatagggcagttggaaacggcctcctagggaaaagttcatagggtctcttcaggttcttagtgtcacttacctagatttacagcctcacttgaatgtgtcactactcacagtctctttaatcttcagttttatctttaatctcctcttttatcttggactgacatttagcgtagctaagtgaaaaggtcatagctgagattcctggttcgggtgttacgcacacgtacttaaatgaaagcatgtggcatgttcatcgtataacacaatatgaatacagggcatgcattttgcagcagtgagtctcttcagaaaacccttttctacagttagggttgagttacttcctatcaagccagtacgtgctaacaggctcaatattcctgaatgaaatatcagactagtgacaagctcctggtcttgagatgtcttctcgttaaggagatgggccttttggaggtaaaggataaaatgaatgagttctgtcatgattcactattctagaacttgcatgacctttactgtgttagctctttgaatgttcttgaaattttagactttctttgtaaacaaatgatatgtccttatcattgtataaaagctgttatgtgcaacagtgtggagattccttgtctgatttaataaaatacttaaacactgaaaaaaaaaaaaaaaaaaaaaaaaaaaaaaaaaaaaaaaaaaaaaaaaaaaaaaaaaaaaaaaaaaaaaaaaaaaaaaaaagtaccttctgaggcggaaagaaccagccggatctcgacttcgagcttatttatattccaaaaaaaaaaaataaaatttcaatttttaagctttcactaattccaaacccacccgctttttatagtaagtttttcacccataaataataaatacaataattaatttctcgtaaaagtagaaaatatattctaatttattgcacggtaaggaagtagatcataactcgagcatgggagatcccgtcgttttacaacgtcgtgactgggaaaaccctggcgttacccaacttaatcgccttgcagcacatccccctttcgccagctggcgtaatagcgaagaggcccgcaccgatcgcccttcccaacagttgcgcagcctgaatggcgaatggcgctttgcctggtttccggcaccagaagcggtgccggaaagctggctggagtgcgatcttcctgaggccgatactgtcgtcgtcccctcaaactggcagatgcacggttacgatgcgcccatctacaccaacgtgacctatcccattacggtcaatccgccgtttgttcccacggagaatccgacgggttgttactcgctcacatttaatgttgatgaaagctggctacaggaaggccagacgcgaattatttttgatggcgttaactcggcgtttcatctgtggtgcaacgggcgctgggtcggttacggccaggacagtcgtttgccgtctgaatttgacctgagcgcatttttacgcgccggagaaaaccgcctcgcggtgatggtgctgcgctggagtgacggcagttatctggaagatcaggatatgtggcggatgagcggcattttccgtgacgtctcgttgctgcataaaccgactacacaaatcagcgatttccatgttgccactcgctttaatgatgatttcagccgcgctgtactggaggctgaagttcagatgtgcggcgagttgcgtgactacctacgggtaacagtttctttatggcagggtgaaacgcaggtcgccagcggcaccgcgcctttcggcggtgaaattatcgatgagcgtggtggttatgccgatcgcgtcacactacgtctgaacgtcgaaaacccgaaactgtggagcgccgaaatcccgaatctctatcgtgcggtggttgaactgcacaccgccgacggcacgctgattgaagcagaagcctgcgatgtcggtttccgcgaggtgcggattgaaaatggtctgctgctgctgaacggcaagccgttgctgattcgaggcgttaaccgtcacgagcatcatcctctgcatggtcaggtcatggatgagcagacgatggtgcaggatatcctgctgatgaagcagaacaactttaacgccgtgcgctgttcgcattatccgaaccatccgctgtggtacacgctgtgcgaccgctacggcctgtatgtggtggatgaagccaatattgaaacccacggcatggtgccaatgaatcgtctgaccgatgatccgcgctggctaccggcgatgagcgaacgcgtaacgcgaatggtgcagcgcgatcgtaatcacccgagtgtgatcatctggtcgctggggaatgaatcaggccacggcgctaatcacgacgcgctgtatcgctggatcaaatctgtcgatccttcccgcccggtgcagtatgaaggcggcggagccgacaccacggccaccgatattatttgcccgatgtacgcgcgcgtggatgaagaccagcccttcccggctgtgccgaaatggtccatcaaaaaatggctttcgctacctggagagacgcgcccgctgatcctttgcgaatacgcccacgcgatgggtaacagtcttggcggtttcgctaaatactggcaggcgtttcgtcagtatccccgtttacagggcggcttcgtctgggactgggtggatcagtcgctgattaaatatgatgaaaacggcaacccgtggtcggcttacggcggtgattttggcgatacgccgaacgatcgccagttctgtatgaacggtctggtctttgccgaccgcacgccgcatccagcgctgacggaagcaaaacaccagcagcagtttttccagttccgtttatccgggcaaaccatcgaagtgaccagcgaatacctgttccgtcatagcgataacgagctcctgcactggatggtggcgctggatggtaagccgctggcaagcggtgaagtgcctctggatgtcgctccacaaggtaaacagttgattgaactgcctgaactaccgcagccggagagcgccgggcaactctggctcacagtacgcgtagtgcaaccgaacgcgaccgcatggtcagaagccgggcacatcagcgcctggcagcagtggcgtctggcggaaaacctcagtgtgacgctccccgccgcgtcccacgccatcccgcatctgaccaccagcgaaatggatttttgcatcgagctgggtaataagcgttggcaatttaaccgccagtcaggctttctttcacagatgtggattggcgataaaaaacaactgctgacgccgctgcgcgatcagttcacccgtgcaccgctggataacgacattggcgtaagtgaagcgacccgcattgaccctaacgcctgggtcgaacgctggaaggcggcgggccattaccaggccgaagcagcgttgttgcagtgcacggcagatacacttgctgatgcggtgctgattacgaccgctcacgcgtggcagcatcaggggaaaaccttatttatcagccggaaaacctaccggattgatggtagtggtcaaatggcgattaccgttgatgttgaagtggcgagcgatacaccgcatccggcgcggattggcctgaactgccagctggcgcaggtagcagagcgggtaaactggctcggattagggccgcaagaaaactatcccgaccgccttactgccgcctgttttgaccgctgggatctgccattgtcagacatgtataccccgtacgtcttcccgagcgaaaacggtctgcgctgcgggacgcgcgaattgaattatggcccacaccagtggcgcggcgacttccagttcaacatcagccgctacagtcaacagcaactgatggaaaccagccatcgccatctgctgcacgcggaagaaggcacatggctgaatatcgacggtttccatatggggattggtggcgacgactcctggagcccgtcagtatcggcggaattccagctgagcgccggtcgctaccattaccagttggtctggtgtcaaaaataataataaccgggcaggggggatccaattctgtgagcgtatggcaaacgaaggaaaaatagttatagtagccgcactcgatgggacatttcaacgtaaaccgtttaataatattttgaatcttattccattatctgaaatggtggtaaaactaactgctgtgtgtatgaaatgctttaaggaggcttccttttctaaacgattgggtgaggaaaccgagatagaaataataggaggtaatgatatgtatcaatcggtgtgtagaaagtgttacatcgactcataatattatattttttatctaaaaaactaaaaataaacattgattaaattttaatataatacttaaaaatggatgttgtgtcgttagataaaccgtttatgtattttgaggaaattgataatgagttagattacgaaccagaaagtgcaaatgaggtcgcaaaaaaactgccgtatcaaggacagttaaaactattactaggagaattattttttcttagtaagttacagcgacacggtatattagatggtgccaccgtagtgtatataggatctgctcccggtacacatatacgttatttgagagatcatttctataatttaggagtgatcatcaaatggatgctaattgacggccgccatcatgatcctattttaaatggattgcgtgatgtgactctagtgactcggttcgttgatgaggaatatctacgatccatcaaaaaacaactgcatccttctaagattattttaatttctgatgtgagatccaaacgaggaggaaatgaacctagtacggcggatttactaagtaattacgctctacaaaatgtcatgattagtattttaaaccccgtggcgtctagtcttaaatggagatgcccgtttccagatcaatggatcaaggacttttatatcccacacggtaataaaatgttacaaccttttgctccttcatattcagctgaaatgagattattaagtatttataccggtgagaacatgagactgactcgagttaccaaattagacgctgtaaattatgaaaaaaagatgtactaccttaataagatcgtccgtaacaaagtagttgttaactttgattatcctaatcaggaatatgactattttcacatgtactttatgctgaggaccgtgtactgcaataaaacatttcctactactaaagcaaaggtactatttctacaacaatctatatttcgtttcttaaatattccaacaacatcaactgaaaaagttagtcatgaaccaatacaacgtaaaatatctagcaaaaattctatgtctaaaaacagaaatagcaagagatccgtacgcggtaataaatagaaacgtactactgagatatactaccgatatagagtataatgatttagttactttaataaccgttagacataaaattgattctatgaaaactgtgtttcaggtatttaacgaatcatccataaattatactccggttgatgatgattatggagaaccaatcattataacatcgtatcttcaaaaaggtcataacaagtttcctgtaaattttctatacatagatgtggtaatatctgacttatttcctagctttgttagactagatactacagaaactaatatagttaatagtgtactacaaacaggcgatggtaaaaagactcttcgtcttcccaaaatgttagagacggaaatagttgtcaagattctctatcgccctaatataccattaaaaattgttagatttttccgcaataacatggtaactggagtagagatagccgatagatctgttatttcagtcgctgattaatcaattagtagagatgagataagaacattataataatcaataatatatcttatatcttatatcttatatcttatatcttgtttagaaaaatgctaatattaaaatagctaacgctagtaatccaatcggaagccatttgatatctataatagggtatctaatttcctgatttaaatagcggacagctatattctcggtagctactcgtttggaatcacaaacattatttacatctaatttactatctgtaatggaaacgtttcccaatgaaatggtacaatccgatacattgcattttgttatatttttttttaaagaggctggtaacaacgcatcgcttcgtttacatggctcgtaccaacaataatagggtaatcttgtatctattcctatccgtactatgcttttatcaggataaatacatttacatcgtatatcgtctttgttagcatcacagaatgcataaatttgttcgtccgtcatgataaaaatttaaagtgtaaatataactattatttttatagttgtaataaaaagggaaatttgattgtatactttcggttctttaaaagaaactgacttgataaaaatggctgtaatctctaaggttacgtatagtctatatgatcaaaaagagattaatgctacagatattatcattagtcatgttaaaaatgacgacgatatcggtaccgttaaagatggtagactaggtgctatggatggggcattatgtaagacttgtgggaaaacggaattggaatgtttcggtcactggggtaaagtaagtatttataaaactcatatagttaagcctgaatttatttcagaaattattcgtttactgaatcatatatgtattcactgcggattattgcgttcacgagaaccgtattccgacgatattaacctaaaagagttatcgggacacgctcttaggagattaaaggataaaatattatccaagaaaaagtcatgttggaacagtgaatgtatgcaaccgtatcaaaaaattactttttcaaagaaaaaggtttgtttcgtcaacaagttggatgatattaacgttcctaattctctcatctatcaaaagttaatttctattcatgaaaagttttggccattattagaaattcatcaatatccagctaacttattttatacagactactttcccatccctccgttgattattagaccggctattagtttttggatagatagtatacccaaagagaccaatgaattaacttacttattaggtatgatcgttaagaattgtaacttgaatgctgatgaacaggttatccagaaggcggtaatagaatacgatgatattaaaattatttctaataacactaccagtatcaatttatcatatattacatccggcaaaaataatatgattagaagttatatcgtcgcccgacgaaaagatcagaccgctagatctgtaattggtcccagtacatctatcaccgttaatgaggtaggaatgcccgcatatattagaaatacacttacagaaaagatatttgttaatgcctttacagtggataaagttaaacaactattagcgtcaaaccaagttaaattttactttaataaacgattaaaccaattaacaagaatacgccaaggaaagtttattaaaaataaaatacatttattgcctggtgattgggtagaagtagctgttcaagaatatacaagtattatttttggaagacagccgtctctacatagatacaacgtcatcgcttcatctatcagagctaccgaaggagatactatcaaaatatctcccggaattgccaactctcaaaatgctgatttcgacggggatgaggaatggatgatattagaacaaaatcctaaagctgtaattgaacaaagtattcttatgtatccgacgacgttactcaaacacgatattcatggagcccccgtttatggatctattcaagatgaaatcgtagcagcgtattcattgtttaggatacaagatctttgtttagatgaagtattgaacatcttggggaaatatggaagagagttcgatcctaaaggtaaatgtaaattcagcggtaaagatatctatacttacttgataggtgaaaagattaattatccgggtctcttaaaggatggtgaaattattgcaaacgacgtagatagtaattttgttgtggctatgaggcatctgtcattggctggactcttatccgatcataagtcgaacgtggaaggtatcaactttattatcaagtcatcttatgtttttaagagatatctatctatttacggttttggggtgacattcaaagatctgagaccaaattcgacgttcactaataaattggaggccatcaacgtagaaaaaatagaacttatcaaagaagcatacgccaaatatctcaacgatgtaagagacgggaaaatagttccattatctaaagctttagaggcggactatgtggaatccatgttatccaacttgacaaatcttaatatccgagagatagaagaacatatgagacaaacgctgatagatgatccagataataacctcctgaaaatggccaaagcgggttataaagtaaatcccacagaactaatgtatattctaggtacgtatggacaacaaaggattgatggtgaaccagcagagactcgagtattgggtagagttttaccttactatcttccagactctaaggatccagaaggaagaggttacattcttaattctttaacaaaaggattaacgggttctcaatattacttttcgatgctggttgccagatctcaatctactgatatcgtctgtgaaacatcacgtaccggaacactggctagaaaaatcattaaaaagatggaggatatggtggtcgacggatacggacaagtagttataggtaatacgctcatcaagtacgccgccaattataccaaaattctaggctcagtatgtaaacctgtagatcttatctatccagatgagtccatgacttggtatttggaaattagtgctctgtggaataaaataaaacagggattcgtttactctcagaaacagaaacttgcaaagaagacattggcgccgtttaatttcctagtattcgtcaaacccaccactgaggataatgctattaaggttaaggatctgtacgatatgattcataacgtcattgatgatgtgagagagaaatacttctttacggtatctaatatagattttatggagtatatattcttgacgcatcttaatccttctagaattagaattacaaaagaaacggctatcactatctttgaaaagttctatgaaaaactcaattatactctaggtggtggaactcctattggaattatttctgcacaggtattgtctgagaagtttacacaacaagccctgtccagttttcacactactgaaaaaagtggtgccgtcaaacaaaaacttggtttcaacgagtttaataacttgactaatttgagtaagaataagaccgaaattatcactctggtatccgatgatatctctaaacttcaatctgttaagattaatttcgaatttgtatgtttgggagaattaaatccaaacatcactcttcgaaaagaaacagataaatatgtagtagatataatagtcaatagattatacatcaagagagcagaaataaccgaattagtcgtcgaatatatgattgaacgatttatctcctttagcgtcattgtaaaggaatggggtatggagacattcattgaggacgaggataatattagatttactgtctacctaaatttcgttgaaccggaagaattgaatcttagtaagtttatgatggttcttccgggggcagccaacaagggaaagattagtaaattcaagattcctatctctgattatacgggatatgacgacttcaatcaaacaaaaaagctcaataagatgactgtagaactcatgaatctaaaagaattgggttctttcgatttggaaaacgtcaacgtgtatcctggagtatggaatacatacgatatcttcggtatcgaggccgctcgtgaatacttgtgcgaagccatgttaaacacctatggagaagggttcgattatctgtatcagccttgtgatcttctcgctagtttactatgtgctagttacgaaccagaatcagtgaataaattcaagttcggcgcagctagtactcttaagagagctacgttcggagacaataaagcattgttaaacgcggctcttcataaaaagtcagaacctattaacgataatagtagctgccacttttttagcaaggtccctaatataggaactggatattacaaatactttatcgacttgggtcttctcatgagaatggaaaggaaactatctgataagatatcttctcaaaagatcaaggaaatggaagaaacagaagacttttaattcttatcaataacatatttttctatgatctgtcttttaaacgatggattttccacaaatgcgcctctcaagtccctcatagaatgatacacgtataaaaaatatagcataggcaatgactccttatttttagacattagatatgccaaaatcatagccccgcttctatttactcccgcagcacaatgaaccaacacgggctcgtttcgttgatcacatttagataaaaaggcggttacgtcgtcaaaatatttactaatatcggtagttgtatcatctaccaacggtatatgaataatattaatattagagttaggtaatgtatatttatccatcgtcaaatttaaaacatatttgaacttaacttcagatgatggtgcatccatagcatttttataatttcccaaatacacattattggttacccttgtcattatagtgggagatttggctttgtgcatatctccagttgaacgtagtagtaagtatttatacaaacttttcttatccatttataacgtacaaatggataaaactactttatcggtaaacgcgtgtaatttagaatacgttagagaaaaggctatagtaggcgtacaagcagccaaaacatcaacacttatattctttgttattatattggcaattagtgcgctattactctggtttcagacgtctgataatccagtctttaatgaattaacgagatatatgcgaattaaaaatacggttaacgattggaaatcattaacggatagcaaaacaaaattagaaagtgatagaggtagacttctagccgctggtaaggatgatatatttgaattcaaatgtgtggatttcggcgcctattttatagctatgcgattggataagaaaacatatctgccgcaagctattaggcgaggtactggagacgcgtggatggttaaaaaggcggcaaaggtcgatccatctgctcaacaattttgtcagtatttgataaaacacaagtctaataatgttattacttgtggtaatgagatgttaaatgaattaggttatagcggttattttatgtcaccgcattggtgttccgattttagtaatatggaatagtgttagataaatgcggtaacgaatgttcctgtaaggaaccataacagcttagatttaacgttaaagatgagcataaacataataaacaaaattacaatcaaacttataacattaatatcaaacaatccaaaaaatgaaatcagtggagtagtaaacgcgtacataactcctggataacgtttagcagctgccgttcctattctagaccaaaaattcggtttcatgttttcgaaacggtattctgcaacaagtcgaggatcgtgttctacatatttggcggcattatccagtatctgcctattgatcttcatttcgttttcgattctggctatttcaaaataaaatcccgatgatagacctccagactttataatttcatctacgatgttcagcgccgtagtaactctaataatataggctgataagctaacatcataccctcctgtatatgtgaatatggcatgatttttgtccattacaagctcggttttaactttattgcctgtaataatttctctcatctgtaggatatctatttttttgtcatgcattgccttcaagacgggacgaagaaacgtaatatcctcaataacgttatcgttttctacaataactacatattctacctttttattttctaactcggtaaaaaaattagaatcccatagggctaaatgtctagcgatatttcttttcgtttcctctgtacacatagtgttacaaaaccctgaaaagaagtgagtatacttgtcatcatttctaatgtttcctccagtccactgtataaacgcataatccttgtaatgatctggatcatccttgactaccacaacatttcttttttctggcataacttcgttgtcctttacatcatcgaacttctgatcattaatatgctcatgaacattaggaaatgtttctgatggaggtctatcaataactggcacaacaataacaggagttttcaccgccgccatttagttattgaaattaatcatatacaactctttaatacgagttatattttcgtctatccattgtttcacattgacatatttcgacaaaaagatataaaatgcgtattccaatgcttctctgtttaatgaattactaaaatatacaaacacgtcactgtctggcaataaatgatatcttagaatattgtaacaatttattttgtattgcacatgttcgtgatctatgagttcttcttcgaatggcataggatctccgaatctgaaaacgtataaataggagttagaataataatatttgagagtattggtaatatataaactctttagcggtataattagtttttttctctcaatttctatttttagatgtgatggaaaaatgactaattttgtagcattagtatcatgaactctaatcaaaatcttaatatcttcgtcacacgttagctctttgaagtttttaagagatgcatcagttggttctacagatggagtaggtgcaacaattttttgttctacacatgtatgtactggagccattgttttaactataatggtgcttgtatcgaaaaactttaatgcagatagcggaagctcttcgccgcgactttctacgtcgtaattgggttctaacgccgatctctgaatggatactagttttctaagttctaatgtgattctctgaaaatgtaaatccaattcctccggcattatagatgtgtatacatcggtaaataaaactatagtatccaacgatcccttctcgcaaattctagtcttaaccaaaaaatcgtatataaccacggagatggcgtatttaagagtggattcttctaccgttttgttcttggatgtcatataggaaactataaagtccgcactactgttaagaatgattactaacgcaactatatagtttaaattaagcattttggaaacataaaataactctgtagacgatacttgactttcgaataagtttgcagacaaacgaagaaagaacagacctctcttaatttcagaagaaaactttttttcgtattcctgacgtctagagtttatatcaataagaaagttaagaattagtcggttaatgttgtatttcattacccaagtttgagatttcataatattatcaaaagacatgataatattaaagataaagcgctgactatgaacgaaatagctatatggttcgctcaagaatatagtcttgttaaacgtggaaacgataactgtatttttaatcacgtcagcggcatctaaattaaatataggtatatttattccacacactctacaatatgccacaccatcttcataataaataaattcgttagcaaaattattaattttagtgaaatagttagcgtcaactttcatagcttccttcaatctaatttgatgctcacacggtgcgaattccactctaacatcccttttccatgcctcaggttcatcgatctctataatatctagttttttgcgtttcacaaacacaggctcgtctctcgcgatgagatctgtatagtaactatgtaaatgataactagatagaaagatgtagctatatagatgacgatcctttaagagaggtataataactttaccccaatcagatagactgttgttatggtcttcggaaaaagaatttttataaatttttccagtattttccaaatatacgtacttaacatctaaaaaatccttaatgataataggaatggataatccgtctattttataaagaaatacatatcgcacattatacttttttttggaaatgggaataccgatgtgtctacataaatatgcaaagtctaaatattttttagagaatcttagttggtccaaattcttttccaagtacggtaatagatttttcatattgaacggtatcttcttaatctctggttctagttccgcattaaatgatgaaactaagtcactatttttataactaacgattacatcacctctaacatcatcatttaccagaatactgatcttcttttgtcgtaaatacatgtctaatgtgttaaaaaaaagatcatacaagttatacgtcatttcatctgtggtattcttgtcattgaaggataaactcgtactaatctcttctttaacagcctgttcaaatttatatcctatatacgaaaaaatagcaaccagtgtttgatcatccgcgtcaatattctgttctatcgtagtgtataacaatcgtatatcttcttctgtgatagtcgatacgttataaaggttgataacgaaaatatttttatttcgtgaaataaagtcatcgtaggattttggacttatattcgcgtctagtagatatgcttttatttttggaatgatctcaattagaatagtctctttagagtccatttaaagttacaaacaactaggaaattggtttatgatgtataatttttttagtttttatagattctttattctatacttaaaaaatgaaaataaatacaaaggttcttgagggttgtgttaaattgaaagcgagaaataatcataaattatttcattatcgcgatatccgttaagtttgtatcgtaatggcgtggtcaattacgaataaagcggatactagtagcttcacaaagatggctgaaatcagagctcatctaaaaaatagcgctgaaaataaagataaaaacgaggatattttcccggaagatgtaataattccatctactaagcccaaaaccaaacgagccactactcctcgtaaaccagcggctactaaaagatcaaccaaaaaggaggaagtggaagaagaagtagttatagaggaatatcatcaaacaactgaaaaaaattctccatctcctggagtcagcgacattgtagaaagcgtggccgctgtagagctcgatgatagcgacggggatgatgaacctatggtacaagttgaagctggtaaagtaaatcatagtgctagaagcgatctctctgacctaaaggtggctaccgacaatatcgttaaagatcttaagaaaattattactagaatctctgcagtatcgacggttctagaggatgttcaagcagctggtatctctagacaatttacttctatgactaaagctattacaacactatctgatctagtcaccgagggaaaatctaaagttgttcgtaaaaaagttaaaacttgtaagaagtaaatgcgtgcacttttttataaagatggtaaactctttaccgataataattttttaaatcctgtatcagacgataatccagcgtatgaggttttgcaacatgttaaaattcctactcatttaacagatgtagtagtatatgaacaaacgtgggaggaggcgttaactagattaatttttgtgggaagtgattcaaaaggacgtagacaatacttttacggaaaaatgcatgtacagaatcgcaacgctaaaagagatcgtatttttgttagagtatataacgttatgaaacgaattaattgttttataaacaaaaatataaagaaatcgtccacagattccaattatcagttggcggtttttatgttaatggaaactatgttttttattagatttggtaaaatgaaatatcttaaggagaatgaaacagtagggttattaacactaaaaaataaacacatagaaataagtcccgatgaaatagttatcaagtttgtaggaaaggacaaagtttcacatgaatttgttgttcataagtctaatagactatataaaccgctattgaaactgacggatgattctagtcccgaagaatttctgttcaacaaactaagtgaacgaaaggtatacgaatgtatcaaacagtttggtattagaatcaaggatctccgaacgtatggagtcaattatacgtttttatataatttttggacaaatgtaaagtccatatctcctcttccgtcaccaaaaaagttaatagcattaactatcaaacaaactgctgaagtggtaggtcatactccatcaatttcaaaaagagcttatatggcaacgactattttagaaatggtaaaggataaaaattttttagatgtagtatctaaaactacgttcgatgaattcctatctatagtcgtagatcacgttaaatcatctacggatggatgatatagatctttacacaaataattacaagaccgataaatggaaatggataagcgtatgaaatctctcgcaatgacagctttcttcggagagctaagcacattagatattatggcattgataatgtctatatttaaacgccatccaaacaataccattttttcagtggataaggatggtcagtttatgattgatttcgaatacgataattataaggcttctcaatatttggatctgaccctcactccgatatctggagatgaatgcaagactcacgcatcgagtatagccgaacaattggcgtgtgcggatattattaaagaggatattagcgaatatatcaaaactactccccgtcttaaacgatttataaaaaaataccgcaatagatcagatactcgtatcagtcgagatacagaaaagcttaaaatagctctagctaaaggcatagattacgaatatataaaagacgcttgttaataagtaaatgaaaaaaaactagtcgtttataataaaacacgatatggatgccaacgtagtatcattttctactattgcgacgtatatagacgctttagcgaagaatgcttcggaattagaacagaggtctaccgcatacgaaataaataatgaattggaactagtatttattaagccgccattgattactttgacaaatgtagtgaatatctctacgattcaggaatcgtttattcgatttaccgttactaataaggaaggtgttaaaattagaactaagattccattatctaaggtacatggtctagatgtaaaaaatgtacagttagtagatgctatagataacatagtttgggaaaagaaatcattagtgacggaaaatcgtcttcacaaagaatgcttgttgagactatcgacagaggaacgtcatatatttttggattacaagaaatatggatcctctatccgactagaattagtcaatcttattcaagcaaaaacaaaaaactttacgatagactttaagctaaaatattttctaggatccggtgcccagtctaaaagttctttgttgcacgctattaatcatccaaagtcaaggcctaatacatctctggaaatagaattcacacctagagacaatgaaacagttccatatgatgaactaataaaggaattgacgactctctcgcgtcatatatttatggcttctccagagaatgtaattctttctccgcctattaacgcgcctataaaaacctttatgttgcctaaacaagatatagtaggtttggatctggaaaatctatatgccgtaactaagactgacggcattcctataactatcagagttacatcaaacgggttgtattgttattttacacatcttggttatattattagatatcctgttaagagaataatagattccgaagtagtagtctttggtgaggcagttaaggataagaactggaccgtatatctcattaagctaatagagcctgtgaatgcaatcaatgatagactagaagaaagtaagtatgttgaatctaaactagtggatatttgtgatcggatagtattcaagtcaaagaaatacgaaggtccgtttactacaactagtgaagtcgtcgatatgttatctacatatttaccaaagcaaccagaaggtgttattctgttctattcaaagggacctaaatctaacattgattttaaaattaaaaaggaaaatactatagaccaaactgcaaatgtagtatttaggtacatgtccagtgaaccaattatctttggagaatcgtctatctttgtagagtataagaaatttagcaacgataaaggctttcctaaagaatatggttctggtaagattgtgttatataacggcgttaattatctaaataatatctattgtttggaatatattaatacacataatgaagtgggtattaagtccgtggttgtacctattaagtttatagcagaattcttagttaatggagaaatacttaaacctagaattgataaaaccatgaaatatattaactcagaagattattatggaaatcaacataatatcatagtcgaacatttaagagatcaaagcatcaaaataggagatatctttaacgaggataaactatcggatgtgggacatcaatacgccaataatgataaatttagattaaatccagaagttagttattttacgaataaacgaactagaggaccgttgggaattttatcaaactacgtcaagactcttcttatttctatgtattgttccaaaacatttttagacgattccaacaaacgaaaggtattggcgattgattttggaaacggtgctgacctggaaaaatacttttatggagagattgcgttattggtagcgacggatccggatgctgatgctatagctagaggaaatgaaagatacaacaaattaaactctggaattaaaaccaagtactacaaatttgactacattcaggaaactattcgatccgatacatttgtctctagtgtcagagaagtattctattttggaaagtttaatatcatcgactggcagtttgctatccattattcttttcatccgagacattatgctaccgtcatgaataacttatccgaactaactgcttctggaggcaaggtattaatcactaccatggacggagacaaattatcaaaattaacagataaaaagacttttataattcataagaatttacctagtagcgaaaactatatgtctgtagaaaaaatagctgatgatagaatagtggtatataatccatcaacaatgtctactccaatgactgaatacattatcaaaaagaacgatatagtcagagtgtttaacgaatacggatttgttcttgtagataacgttgatttcgctacaattatagaacgaagtaaaaagtttattaatggcgcatctacaatggaagatagaccgtctacaaaaaactttttcgaactaaatagaggagccattaaatgtgaaggtttagatgtcgaagacttacttagttactatgttgtttatgtcttttctaagcggtaaataataatatggtatgggttctgatctcccagttctaaatgcattaaataattccaatagagcgatttttgttcctataggaccttccaactgtggatactctgtattgttaatagatatattaatacttttgtcgggtaacagaggttctacgtcttctaaaaataaaagttttataacatctggcctgttcataaataaaaacttggcgattctatatatactcttattatcaaatctagccattgtcttatagatgtgagctactgtaggtgtaccatttgattttctttctaatactatatatttctctcgaagaagttcttgcacatcatctgggaataaaatactactgttgagtaaatcagttattttttttatatcgatattgatggacatttttatagttaaggataataagtatcccaaagtcgataacgacgataacgaagtatttatacttttaggaaatcacaatgactttatcagattaaaattaacaaaattaaaggagcatgtatttttttctgaatatattgtgactccagatacatatggatctttatgcgtcgaattaaatgggtctagttttcagcacggcggtagatatatagaggtggaggaatttatagatgctggaagacaagttagatggtgttctacatccaatcatatatctaaagatatacccgaagatatgcacactgataaatttgtcatttatgatatttatacgtttgattcgttcaagaataaacgattggtattcgtacaggtacctccgtcgttaggagatgatagtcatttgactaatccgttattgtcaccgtattatcgtaattcagtagccagacaaatggtcaatgatatgatttttaatcaagattcatttttaaaatatttattagaacatctgattagaagccactatagagtttctaaacatataacaatagttagatacaaggataccgaagaattaaatctaacgagaatatgttataatagagataagtttaaggcgtttgtattcgcttggtttaacggcgtttcggaaaatgaaaaggtactagatacgtataaaaaggtatctaatttgatataatgaattcagtgactgtatcacacgcgccatatactattacttatcacgatgattgggaaccagtaatgagtcaattggtagagttttataacgaagtagccagttggctgctacgagacgagacgtcgcctattcctgataagttctttatacagttgaaacaaccgcttagaaataaacgagtatgtgtgtgtggtatagatccgtatccgaaagatggaactggtgtaccgttcgaatcaccaaattttacaaaaaaatcaattaaggagatagcttcatctatatctagattaaccggagtaattgattataaaggttataaccttaatataatagacggggttataccctggaattattacttaagttgtaaattaggagaaacaaaaagtcacgcgatttactgggataagatttccaagttactgctgcagcatataactaaacacgttagtgttctttattgtttgggtaaaacagatttctcgaatatacgggccaagttagaatccccggtaactaccatagtcggatatcatccagcggctagagaccgccaattcgagaaagatagatcatttgaaattatcaacgttttactggaattagacaacaaggcacctataaattgggctcaagggtttatttattaatgctttagtgaaattttaacttgtgttctaaatggatgcggctattagaggtaatgatgttatctttgttcttaagactataggtgtcccgtcagcgtgcagacaaaatgaagatccaagatttgtagaagcatttaaatgcgacgagttagaaagatatattgagaataatccagaatgtacactattcgaaagtcttagggatgaggaagcatactctatagtcagaattttcatggatgtagatttagacgcgtgtctagacgaaatagattatttaacggccattcaagattttattatcgaggtgtcaaactgtgtagctagattcgcgtttacagaatgcggcgccattcatgaaaatgtaataaaatccatgagatctaatttttcattgactaagtctacaaatagagataaaacaagttttcatattatctttttagatacgtataccactatggatacattgatagctatgaaacgaacactattagaattaagtagatcatctgaaaatccactaaccagatcgatagacactgccgtatataggagaaaaacaactcttcgggttgtaggtactaggaaaaatccaaattgcgacactattcatgtaatgcaaccaccgcatgataatatagaagattacctattcacttacgtggatatgaacaacaatagttattacttttctctacaacaacgattggaggatttagttcctgataagttatgggaaccagggtttatttcattcgaagacgctataaaaagagtttcaaaaatattcattaattctataataaactttaatgatctcgatgaaaataattttacaacggtaccactggtcatagattacgtaacaccttgtgcattatgtaaaaaacgatcgcataaacatccgcatcaactatcgttggaaaatggtgctattagaatttacaaaactggtaatccacatagttgtaaagttaaaattgttccgttggatggtaataaactgtttaatattgcacaaagaattttagacactaactctgttttattaaccgaacgaggagaccatatagtttggattaataattcatggaaatttaacagcgaagaacccttgataacaaaactaattttgtcaataagacatcaactacctaaggaatattcaagcgaattactctgtccaagaaaacgaaagactgtagaagctaacatacgagacatgttagtagattcagtggagaccgatacctatccggataaacttccgtttaaaaatggtgtattggacctggtagacggaatgttttactctggagatgatgctaaaaaatatacgtgtactgtatcaaccggatttaaatttgacgatacaaagttcgtcgaagacagtccagaaatggaagagttaatgaatatcattaacgatatccaaccattaacggatgaaaataagaaaaatagagagctatatgaaaaaacattatctagttgtttatgcggtgctaccaaaggatgtttaacattcttttttggagaaactgcaactggaaagtcgacaaccaaacgtttgttaaagtctgctatcggtgacctgtttgttgagacgggtcaaacaattttaacagatgtattggataaaggacctaatccatttatcgctaacatgcatttgaaaagatctgtattctgtagcgaactacctgattttgcctgtagtggatcaaagaaaattagatctgacaatattaaaaagttgacagaaccttgtgtcattggaagaccgtgtttctccaataaaattaataatagaaaccatgcgacaatcattatcgatactaattacaaacctgtttttgataggatagataacgcattaatgagaagaattgccgtcgtgcgattcagaacacacttttctcaaccttctggtagagaggctgctgaaaataatgacgcgtacgataaagtcaaactattagacgaggggttagatggtaaaatacaaaataatatatatagatttgcatttctatacttgttggtgaaatggtacaaaaaatatcatgttcctattatgaaactatatcctacacccgaagagattcctgactttgcattctatctcaaaataggtactctgttggtatctagctctgtaaagcatattccattaatgacggacctctccaaaaagggatatatattgtacgataatgtggtcactcttccgttgactactttccaacagaaaatatccaagtattttaattctagactatttggacacgatatagagagcttcatcaatagacataagaaatttgccaatgttagtgatgaatatctgcaatatatattcatagaggatatttcatctccgtaaatatatgctcatatatttatagaagatatcacatatctaaatgaataccggaatcatagatttatttgataatcatgttgatagtataccaactatattacctcatcagttagctactctagattatctagttagaactatcatagatgagaacagaagcgtgttattgttccatattatgggatcaggtaaaacaataatcgctttgttgttcgccttggtagcttccagatttaaaaaggtttacattctagtgccgaacatcaacatcttaaaaattttcaattataatatgggtgtagctatgaacttgtttaatgacgaattcatagctgagaatatctttattcattccacaacaagtttttattctcttaattataacgataacgtcattaattataacggattatctcgctacaataactctatttttatcgttgatgaggcacataatatctttgggaataatactggagaacttatgaccgtgataaaaaataaaaacaagattccttttttactattgtctggatctcccattactaacacacctaatactctgggtcatattatagatttaatgtccgaagagacgatagattttggtgaaattattagtcgtggtaagaaagtaattcagacacttcttaacgaacgcggtgtgaatgtacttaaggatttgcttaaaggaagaatatcatattacgaaatgcctgataaagatctaccaacgataagatatcacggacgtaagtttctagatactagagtagtatattgtcacatgtctaaacttcaagagagagattatatgattactagacgacagctatgttatcatgaaatgtttgataaaaatatgtataacgtgtcaatggcagtattgggacaacttaatctgatgaataatttagatactttatttcaggaacaggataaggaattgtacccaaatctgaaaataaataatggcgtgttatacggagaagaattggtaacgttaaacattagttccaaatttaaatactttattaatcggatacagacactcaacggaaaacattttatatacttttctaattctacatatggcggattggtaattaaatatatcatgctcagtaatggatattctgaatataatggttctcagggaactaatccacatatgataaacggcaaaccaaaaacatttgctatcgttactagtaaaatgaaatcgtctttagaggatctattagatgtgtataattctcctgaaaacgatgatggtagtcaattgatgtttttgttttcatcaaacattatgtccgaatcctatactctaaaagaggtaaggcatatttggtttatgactatcccagatactttttctcaatacaaccaaattcttggacgatctattagaaaattctcttacgccgatatttctgaaccagttaatgtatatcttttagccgccgtatattccgatttcaatgacgaagtgacgtcattaaacgattacacacaggatgaattaattaatgttttaccatttgacatcaaaaagctgttgtatctaaaatttaagacgaaagaaacgaatagaatatactctattcttcaagagatgtctgaaacgtattctcttccaccacatccatcaattgtaaaagttttattgggagaattggtcagacaatttttttataataattctcgtattaagtataacgataccaagttacttaaaatggttacatcagttataaaaaataaagaagacgctaggaattacatagatgatattgtaaacggtcacttctttgtatcgaataaagtatttgataaatctcttttatacaaatacgaaaacgatattattacagtaccgtttagactttcctacgaaccatttgtttggggagttaactttcgtaaagaatataacgtggtatcttctccataaaactgatgagatatataaagaaataaatgtcgagctttgttaccaatggatacctttccgttacattggaaccacacgagctgacgttagacataaaaactaatattaggaatgccgtatataagacgtatctccatagagaaattagtggtaaaatggccaagaaaatagaaattcgtgaagacgtggaattacctctcggcgaaatagttaataattctgtagttataaacgttccgtgtgtaataacctacgcgtattatcacgttggggatatagtcagaggaacattaaacatcgaagatgaatcaaatgtaactattcaatgtggagatttaatctgtaaactaagtagagattcgggtactgtatcatttagcgattcaaagtactgcttttttcgaaatggtaatgcgtatgacaatggcagcgaagtcactgccgttctaatggaggctcaacaaggtatcgaatctagttttgtttttctcgcgaatatcgtcgactcataaaaaagagaatagcggtaagtataaacacgaatactatggcaataattgcgaatgttttattctcttcgatatatttttgataatatgaaaaacatgtctctctcaaatcggacaaccatctcataaaatagttctcgcgcgctggagaggtagttgccgctcgtataatctctccagaataatatacttgcgtgtcgtcgttcaatttatacggatttctatagttctctgttatataatgcggtttgccctcatgattagacgacgacaatagtgttctaaatttagatagttgatcagaatgaatgtttattggcgttggaaaaattatccatacagcgtctgcagagtggttgatagttgttcctagatatgtaaaataatccaacttactaggcagcaaattgtctagataaaatactgaatcaaacggtgcagacgtattggcggatctaatggaatccaattgattaactatcttttgaaaatatacatttttatgatccaatacttgtaagaatatagaaataatgataagtccatcatcgtgtttttttgcctcttcataagaactatattttttcttattccaatgaacaagattaatctctccagagtatttgtacacatctatcaagtgattggatccataatcgtcttcctttccccaatatatatgtagtgatgataacacatattcattggggagaaaccctccacttatatatcctcctttaaaattaatccttactagttttccagtgttctggatagtggttggtttcgactcattataatgtatgtctaacggcttcaatcgcgcgttagaaattgcttttttagtttctatattaataggagatagttgttgcggcatagtaaaaatgaaatgataactgtttaaaaatagctcttagtatgggaattacaatggatgaggaagtgatatttgaaactcctagagaattaatatctattaaacgaataaaagatattccaagatcaaaagacacgcatgtgtttgctgcgtgtataacaagtgacggatatccgttaataggagctagaagaacttcattcgcgttccaggcgatattatctcaacaaaattcagattctatctttagagtatccactaaactattacggtttatgtactacaatgaactaagagaaatctttagacggttgagaaaaggttctatcaacaatatcgatcctcactttgaagagttaatattattgggtggtaaactagataaaaaggaatctattaaagattgtttaagaagagaattaaaagaggaaagtgatgaacgtataacagtaaaagaatttggaaatgtaattctaaaacttacaacacgggataaattatttaataaagtatatataagttattgcatggcgtgttttattaatcaatcgttggaggatttatcgcatactagtatttacaatgtagaaattagaaagattaaatcattaaatgattgtattaacgacgataaatacgaatatctgtcttatatttataatatgctagttaatagtaaatgaacttttacagatctagtataattagtcagattattaagtataatagacgactagctaagtctattatttgcgaggatgactctcaaattattacactcacggcattcgttaaccaatgcctatggtgtcataaacgagtatccgtgtccgctattttattaactactgataacaaaatattagtatgtaacagacgagatagttttctctattctgaaataattagaactagaaacatgtttagaaagaaacgattatttctgaattattccaattatttgaacaaacaggaaagaagtatactatcgtcatttttttctctagatccagctactactgataatgatagaatagacgctatttatccgggtggcatacccaaaaggggtgagaatgttccagagtgtttatccagggaaattaaagaagaagttaatatagacaattcttttgtattcatagacactcggttttttattcatggcatcatagaagataccattattaataaattttttgaggtaatcttctttgtcggaagaatatctctaacgagtgatcaaatcattgatacatttaaaagtaatcatgaaatcaaggatctaatatttttagatccgaattcaggtaatggactccaatacgaaattgcaaaatatgctctagatactgcaaaacttaaatgttacggccatagaggatgttattatgaatcattaaaaaaattaactgaggatgattgattaaaaaatataaattaatttaccatcgtgtatttttataacgggattgtccggcatatcatgtagatagttaccgtctacatcgtatactcgaccatctacgcctttaaatcctctatttattgacattaatctattagaattggaataccaaatattagtaccctcaattagtttattggtaatattttttttagacgatagatcgatggctcttgaaaccaaggttttccaaccggactcattgtcgatcggtgagaagtctttttcattagcatgaatccattctaatgatgtatgtttaaacactctaaacaattggacaaattcttttgatttgctttgaatgatttcaaataggtcttcgtctacagtaggcataccattagataatctagccattataaagtgcacgtttacatatctacgttctggaggagtaagaacgtgactattgagacgaatggctcttcctactatctgacgaagagacgcctcgttccatgtcatatctaaaatgaagatatcattaattgagaaaaaactaataccctcgcctccactagaagagaatacgcatgttttaatgcattctccgttagtgtttgattcttggttaaactcagccaccgccttgattctagtatcttttgttctagatgagaactctatattagagataccaaagactttgaaatatagtaataagatttctattcctgactgattaacaaatggttcaaagactagacatttaccatgggatgctaatattcccaaacatacatctataaatttgacgcttttctcttttaattcagtaaatagagagatatcagccgcactagcatcccctttcaatagttctccctttttaaaggtatctaatgcggatttagaaaactctctatctcttaatgaatttttaaaatcattatatagtgttgctatctcttgcgcgtattcgcccggatcacgattttgtctttcaggaaagctatcgaacgtaaacgtagtagccatacgtctcagaattctaaatgatgatatacctgtttttatttcagcgagtttagccttttgataaatttcttcttgctttttcgacatattaacgtatcgcattaatactgttttcttagcgaatgatgcagacccttctacgtcatcaaaaatagaaaactcgttattaactatatacgaacatagtcctcctagtttggagactaattctttttcatcgactagacgtttattctcaaatagcgattggtgttgtaaggatcctggtcgtagtaagttaaccaacatggtgaattcttgcacactattgacgataggtgtagccgataaacaaatcatcttatggttttttaacgcaatggtcttagataaaaaattatatactgaacgagtaggacggatcttaccatcttctttgattaatgatttagaaatgaagttatgacattcatcaataatgacgcatattctactcttggaattaatagttttgatattagtaaaaaatttatttctaaaattttgatcatcgtaattaataaaaatacaatccttcgttatctctggagcgtatctgagtatagtgttcatccaaggatcttctatcaaagcctttttcaccaataagataatagcccaattcgtataaatatccttaagatgtttgagaatatatacagtagtcattgttttaccgacacccgtttcatggaacaataaaagagaatgcatactgtctaatcctaagaaaactcttgctacaaaatgttgataatccttgaggcgtactacgtccgaccccatcatttcaacgggcatattagtagttctgcgtaaggcataatcgatataggccgcgtgtgatttactcatttatgagtgataagtaataactatgttttaaaaatcacagcagtagtttaactagtcttctctgatgtttgttttcgatactttttgaatcagaagtcatactagaataaagcaacgagtgaacgtaatagagagcttcgtatactctattcgaaaactctaagaacttattaatgaattccgtatccactggattgtttaaaatactaaattgaacactgttcacatccttccaagaagaagacttagtgacggacttaacatgagacataaataaatccaaattttttttacaaacatcactagccaccataatggcgctatctttcaaccagctatcgcttacgcattttagcagtctaacatttttaaagagactacaatatattctcatagtatcgattacacctctaccgaataaagttggaagtttaataatacaatatttttcgtttacaaaatcaaataatggtcgaaacacgtcgaaggttaacatcttataatcgctaatgtatagattgttttcagtgagatgattattagatttaatagcatctcgttcacgtttgaacagtttattgcgtgcgctgaggtcggcaactacggcgtccgctttagtactcctcccataatactttacgctattaatctttaaaatttcatagactttatctagatcgctttctggtaacatgatatcatgtgtaaaaagttttaacatgtcggtcggcattctatttagatcattaactctagaaatctgaagaaagtaattagctccgtattccagactaggtaatgggcttttacctagagacagattaagttctggcaatgtttcataaaatggaagaaggacatgcgttccctcccggatattttttacaatttcatccatttacaactctatagtttgttttcattattattagttattatctcccataatcttggtaatacttaccccttgatcgtaagataccttatacaggtcattacatacaactaccaattgtttttgtacataatagattggatggttgacatccatggtggaataaactactcgaacagatagtttatctttccccctagatacattagccgtaatagttgtcggcctaaagaatatctttggtgtaaagttaaaagttagggttcttgttccattattgctttttgtcagtagttcattataaattctcgagatgggtccgttctctgaatatagaacatcatttccaaatctaacttctagtctagaaataatatcggtcttattcttaaaatctattcccttgatgaagggatcgttaatgaacaaatccttggcctttgattcggctgatctattatctccgttatagacgttacgttgactagtccaaagacttacaggaatagatgtatcgatgatgttgatactatgtgatatgtgagcaaagattgttctcttagtggcatcactatatgttccagtaatggcggaaaactttttagaaatgttatatataaaagaattttttcgtgttccaaacattagcagattagtatgaagataaacactcatattatcaggaacattatcaatttttacatacacatcagcatcttgaatagaaacgataccatcttctggaacctctacgatctcggcagactccggataaccagtcggtgggccatcgctaacaataactagatcatccaacaatctactcacatatgcatctatataatctttttcatcttgtgagtaccctggatacgaaataaatttattatccgtatttccataataaggtttagtataaacagagagagatgttgccgcatgaacttcagttacagtcgccgttggttggtttatttgacctattactctcctaggtttctctataaacgatggtttaatttgtacattcttaaccatatatccaataaagctcaattcaggaacataaacaaattctttgttgaacgtttcaaagtcgaacgaagagtcacgaataacgatatcggatactggattgaaggttaccgttacggtaatttttgaatcggatagtttaagactgctgaatgtatcttccacatcaaacggagttttaatataaacgtatactgtagatggttctttaatagtgtcattaggagttaggccaatagaaatatcattaagttcactagaatatccagagtgtttcaaagcaattgtattattgatacaattattatataattcttcgccctcaatttcccaaataacaccgttacacgaagagatagatacgtgattaatacatttatatccaacatatggtacgtaactgaatcttcccatacctttaacttctggaagttccaaactcagaaccaaatgattaagcgcagtaatatactgatccctaatttcgaagctagcgatagcctgattgtctggaccatcgtttgtcataactccggatagagaaatatattgcggcatatacaaagttggaatttgactatcgactgcgaagacattagaccgtttaatagagtcatccccaccgatcaaagaattaatgatagtattattcattttctatttaaaatggaaaaagcttacaataaactccgtagagaaatatctataatttgtgagttttccttaaagtaacagcttccgtaaacgccgtctttatctcttagtaggtttattgtatttatgaccttttccttatcttcatagaatactaaaggcaacaaagaaatttttggttcttctctaagagctacgtgagacttaaccatagaagccaacgaatccctacatattttagaacagaaataccctacttcaccacccttgtatgtctcaatactaataggtctaaaaaccaaatcttgattacaaaaccaacacttatcaattacactatttgtcttaatagacacatctgccatagatttataatactttggtagtatacaagcgagtgcttcttctttagcgggcttaaagactgctttaggtgctgaaataaccacatctggaaggcttactcgcttagccatttaattacggaactatttttttatacttctaatgagcaagtagaaaacctctcatctacaaaaacgtactcgtgtccataatcctctaccatagttacacgttttttagatctcatatgtgctaaaaagttttcccatactaattggttactattatttttcgtataatttttaacagtttgaggttttagatttttagttacagaagtgatatcgaatattttatccaaaaagaatgaataattaattgtcttagaaggagtgttttcttggcaaaagaataccaagtgcttaaatatttctactacttcattaatcttttctgtactcagattcagtttctcatcttttacttgattgattatttcaaagactaacttataatcctttttatttattctctcgttagccttaagaaaactagatacaaaatttgcatctacatcatccgtggatatttgatttttttccatgatatccaagagttccgagataatttctccagaacattgatgagacaataatctccgcaatacatttctcaaatgaataagtttattagacacgtggaagtttgactttttttgtacctttgtacatttttgaaataccgactcgcaaaaaatacaatattcatatccttgttcagatactataccgttatgtctacaaccgctacataatcgtagattcatgttaacactctacgtatctcgtcgtccaatattttatataaaaacattttatttctagacgttgccagaaaatcctgtaatatttttagttttttgggctgtgaataaagtatcgccctaatattgttaccgtcttccgccaatatagtagttaaattatccgcacatgcagaagaacaccgcttaggcggattcagtacaatgttatatttttcgtaccaactcatttaaatatcataatctaaaatagttctgtaatatgtctagcgctaatatattgatcataatcctgtgcataaattaagatacaacaatgtctcgaaatcatcgacatggcttcttccatagttagaagatcgtcgtcaaagttagcaacgtgattcatcaacatttgctgttttgaggcagcaaatactgaaccgtcgccattcaaccattcataaaaaccatcgtctgaatccattgataatttcttgtactggtttttgagagctcgcatcaatctagcatttctagctcccggattgaaaacagaaagaggatcgtacatccagggtccattttctgtaaatagaatcgtataatgtcccttcaagaagatatcagacgatccacaatcaaagaattggtctccgagtttgtaacaaactgcggactttaacctatacatgataccgtttagcataatttctggtgatacgtcaatcggagtatcatctattagagatctaaagccggtgtaacattctccaccaaacatattcttattctgacgtcgttctacataaaacatcattgctccattaacgataacaggggaatgaacagcactacccatcacattagttcccaatggatcaatgtgtgtaactccagaacatcttccatagcctatgttaggaggagcgaacaccactcttccactattgccatcgaatgccatagaataaatatccttggaattgatagaaatcggactgtcggatgttgtgatcatcttcataggattaacaactatgtatggtgccgcctgaagtttcatatcgtaactgatgccgtttataggtctagccacagaaaccaacgtaggtctaaatccaactatagacaaaatagaagccaatatctgttcctcatctgtcataacttgagagcatccagtatgaataatcttcattagatggggatctaccgcatcatcatcgttacaataaaaaattcccattctaatgttcataattgcttttctaatcatggtatgcatgtttgctctctgaatctctgtggaaattagatctgatacacctgtaatcactatcggattatcctccgtaagacgattaaccaacaacatataattataagactttacttttctaaattcataaagttgctggattaggctataggtgtctccatgtacatacgcgttctcgagcgcaggaagtttaataccgaatagtgccatcagaataggatgaatatagtaattagtttctggttttctataaataaaagacaaatcttgtgaactagacatatcggtaaaatgcatggattggaatcgtgtagtcgacagaagaatatgatgattagatggagagtatattttatctaactctttgagttggtcaccgattctaggactagctcgagaatgaataagtactaaaggatgagtacatttcacagaaacactagcattgttcaatgtgctctttacatgggtaaggagttgaaatagctcgtttctatttgttctgacaatatttagtttattcataatgttaagcatatcctgaatagtaaagttagatgtgtcatacttgttagtagttagatatttagcaattgcattcccatcatttctcaatctcgtactccaatcatgcgtggatgctacttcgtcgatggaaaccatacaatcctttttgataggctgttgagattgatcatttcctgcacgtttaggtttggtacgttgatttctagcccctgcggatataaagtcatcgtctacaatttgggacaatgaattgcatacactacaagacaaagatttatcagaagtgtgaatatgatcttcatctaccaaagaaagagtttgattagtataactagattttagtcctgcgttagatgttaaaaaaacatcgctattgaccacggcttccattatttatattcgtagtttttactcgaaagcgtgattttaatatccaatcttattacttttggaatcgttcaaaacctttgactagttgtagaatttgatctattgccctacgcgtatactcccttgcatcatatacgttcgtcaccagatcgtttgtttcggcctgaagttggtgcatatctctttcaacattcgacatgagatccttaagggccatatcgtctagattttgttgagatgctgctcctggatttggattttgttgtgctgttgtacatactgtaccaccagtaggtgtaggagtacatacagtggccacaataggaggttgagaaagtgtaaccgttggagtagtacaagaaatacttccatccgattgttgtgtacatgtagttgttggtaacgtctgagaaggttgggtagatggcggcgtcgtcgttttttgatctttattaaatttagagataatatcctgaacagcattgctcggcgtcaacgctggaaggagtgaactcgccggcgcatcagtatcttcagacagccaatcaaaaagattagacatatcagatgatgtattagtttgttgtcgtggttttggtgtaggagcagtactactaggtagaagaataggagccgatgtagctgttggaaccggctgtggagttatatgaatagttggttgtagcggttggataggctgtctgctggcggccatcatattatctctagctagttgttctcgcaactgtctttgataatacgactcttgagactttagtcctatttcaatcgcttcatcctttttcgtatccggatccttttcttcagaataatagattgacgactttggtgtagaggattctgccagcctctgtgagaacttgttaaagaagtccatttaaggctttaaaattgaattgcgattataagattaaatggcagacacagacgatattatcgactatgaatccgatgatctcaccgaatacgaggatgatgaagaagaggaagaagatggagagtcactagaaactagtgatatagatcccaaatcttcttataagattgtagaatcagcatccactcatatagaagatgcgcattccaatcttaaacatatagggaatcatatatctgctcttaaacgacgctatactagacgtataagtctatttgaaatagcgggtataatagcagaaagctataacttgcttcaacgaggaagattacctctagtttcagaattttctgacgaaacgatgaagcaaaatatgctacatgtaattatacaagagatagaggagggttcttgtcctatagtcatcgaaaagaacggagaattgttgtcggtaaacgattttgacaaagatggtctaaaattccatctagactatattatcaaaatttggaaacttcaaaaacgatattagaatttatacgaatatcgttctctaaatgtcacaatcaagtctcgcatgttcagcaatttattgtcgtactttatatcgtgttcattaacgatatcttgcaaaatagtaatgattctatcttccttcgatagatattcttcagagattattgtcttatattctttcttgttatcagatatgaatttgataagactttgaacattattgatacccgtctgtttaattttttctacagatattttagttttggcagattctatcgtatctgtcaatagacatccaacatcgacattcgacgtcaattgtctataaatcaacgtataaattttagaaataacattagcgaattgttgtgcgttgatgtcgttattctgaaacagtatgattttaggtagcattttcttaacaaagagaacgtatttattgttactcagttgaacagatgatatatccagattactaacgcatctgattccgtataccaaactttcagaagaaatggtatacaattgtttgtattcattcaatgtctctttttcagaaattagtttagagtcgaatactgcaataattttcaagagatagttttcatcagataagattttatttagtgtagatatgataaaactattgttttgttggagaacttgatacgccgcgttctctgtagtcgacgctctcaaatgggaaacaatctccattatttttttggaatcggatactatatcttcggtatcttgacgcagtctagtatacatagagttaagagagattagagtttgtacattaagcaacatgtctctaaatgtggctacaaacttttcctttttcacatcatctagtttattatataccgatttcacaacggcaccagatttaaggaaccagaatgaaaaactctgataactacaatatttcatcatagttacgattttatcatcttctatagttggtgtaatagcgcatacctttttctccaagactggaaccaacgtcataaaaatgtttaaatcaaaatccatatcaacatctgatgcgctaagaccagtctcgcgttcaagattatctttactaatggtgacgaactcatcgtataaaactctaagtttgtccattatttatttacagatttagttgtttaatttatttgtgctcttccagagttgggatagtatttttctaacgtcggtattatattattaggatctacgttcatatgtatcataatattaatcatccacgttttgataaatctatctttagcttctgaaataacgtatttaaacaaaggagaaaaatatttagctacggcatcagacgcaataacattttttgtaaatgtaacgtatttagacgacagatcttcgttaaaaagttttccatctatgtagaatccatcggttgttaacaccattcccgcgtcagattgaataggagtttgaatagtttgttttggaaatagatccttcaataacttatagttgggtgggaaaaaatcgattttatcactagactctttcttttttactatcattacctcatgaactatttcttgaatgagtatatgtattttctttcctatatcggacgcgttcattggaaaatataccatgtcgttaactataagaatatttttatcctcgtttacaaactgaataatatcagatgtagttcgtaaacgaactatatcatcaccagcacaacatctaactatatgatatccactagtttcctttagccgtttattatcttgttccatattagcagtcattccatcatttaagaaggcgtcaaaaataatagggagaaatgacattttggattctgttacaactttaccaaaattaaggatatacggacttactatctttttctcaacgtcaatttgatgaacacacgatgaaaatgtgcttctatgagattgatcatgtagaaaacaacaagggatacaatatttccgcatatcatgaaatatattaagaaatcccaccttattatatttccccaaaggatccatgcacgtaaacattatgccgttatcattaataaagacttctttctcatcggatctgtaaaagttgttactgatttttttcattccaggatctagataattaataatgatgggttttctattcttattctttgtattttggcatatcctagaccagtaaacagtttccactttggtaaaatcagcagacttttgaacgctattaaacatggcattaatggcaataactaaaaatgtaaaatatttttctatgttaggaatatggtttttcactttaatagatatatggtttttggccaaaatgatagatatttttttatccgaggatagtaaaatattattagtcgccgtctctataaaaatgaagctagtctcgatatccaattttattctagaattgataggagtcgccaaatgtaccttatacgttatatctcccttgatgcgttccatttgtgtatctatatcggacacaagatctgtaaatagttttacgttattaatcatcacggtatcgccgtcgctagataacgctaatgtaccatccaagtcccaaatggagagatttaactgttcatcgtttagaataaaatgattaccggtcatattaataaagtgttcatcgtatctagataacaacgacttataattaatgtccaagtcttgaactcgctgaatgatcttttttaacccagttagttttagattggtacgaaatatattgttaaactttgattctacagtaatgtccaaatctagttgtggaaatacttccatcaacattgtttcaaacttgataatattattatctacatcttcgtacgatccaaattccggaatagatgtatcgcacgctctggccacccagataaccaaaaagtcacacgctccaggatatacattgtataaaaagctatcgttttttagtagggtttttttctgcgtgtatacgaagggattaaaaatagtattatcaacgtaactatattccaaattattcttatgagaatagataataatatcgtccttaatatctaacaaatttcctaaatatccctttaattgagtcattcgaagcgtcaatagaatatgtctcttaactatttccggctgttgtatatttaaatgacttcgtaaaaaataatatatgggcgacttctcatctatgtaatcatatggagtgagatatagggctcgttctacctcctgccccttacccacctgtaataccaattgcggacttactatatatcgcatatttatatcgtggggtaaagtgaaaatctactaccgatgatgtaagtcttacaatgttcgaaccagtaccagatcttaatttggaggcctccgtagaactaggggaggtaaatatagatcaaacaacacctatgataaaggagaatagcggttttatatcccgcagtagacgtctattcgcccatagatctaaggatgatgagagaaaactagcactacgattctttttacaaagactttattttttagatcatagagagattcattatttgttcagatgcgttgacgctgtaaaagacgtcactattaccaaaaaaaataacattatcgtggcgccttatatagcacttttaactatcgcatcaaaaggatgcaaacttacagaaacaatgattgaagcattctttccagaactatataatgaacatagtaagaaatttaaattcaactctcaagtatccatcatccaagaaaaactcggataccagtttggaaactatcacgtttatgattttgaaccgtattactctacagtagctctggctattcgagatgaacattcatctggcatttttaatatccgtcaagagagttatctggtaagttcattatctgaaataacatatagattttatctaattaatctaaaatctgatcttgttcaatggagtgctagtacgggcgctgtaattaatcaaatggtaaatactgtattgattacagtgtatgaaaagttacaactggtcatagaaaatgattcacaatttacatgttcattggctgtggaatcaaaacttccaataaaattacttaaagatagaaatgaattatttacaaaattcattaacgagttaaaaaagaccagttcattcaagataagcaaacgcgataaggatacgctactaaaatattttacttaggactggagttagaatttatagacgactcatttcgtttatcattgttactattattactattactatcattattagtgttggcattattagtattcttcttgtcatcttgttcagaaatatacagcaatgctatacctaatactaaatacattatcatgctcgcaatggctctaacaacaacgaaccaaaatgaatttggtcgtagcttttgttcacaaaaatacataaagaaatgtctacataaatctatggcgccattggctacttgaaatagcgccagtcctcctacagattttaatatagctgtataacatgacatttattcatcatcaaaagagacagagtcaccatctgtcatatttagattttttttcatgtgttcaaagtatcctctactcatttcattataatagtttatcatacttagaattttaggacggatcaatgagtaagacttgactagatcgtcagtagtaatttgtgcatcgtctattctgcatccgcttcgtcgaataatgtatagcatcgctttgagattctccatagctatcaagtctttatacaatgacatggaaatatctgtgaatactttatacttctccaacatcgatgccttaacatcatcgcctactttagcattgaaaatacgttctattgtgtagatggatgtagcaagatttttaaacaacaatgccatcttacacgatgattgcctcaagtctccaatcgtttgtttagaacgattagctacagagtccaatgcttggctgactagcatattattatctttagaaattgtattcttcaatgaggcgtttatcatatctgtgatttcgttagtcatattacagtctgactgggttgtaatgttatccaacatatcacctatggatacggtacacgtaccagcatttgtaataatcctatctaagatgttgtatggcattgcgcagaaaatatcttctcctgtaatatctccactctcgataaatctactcagattattcttaaatgccttattctctggagaaaagatatcagtgtccatcatttcattaatagtatacgcagaaaagataccacgagtatcaattctatccaagatacttatcggttccgagtcacagataatggtttcctctccttcgggagatcctgcatagaaatatctaggacaatagtttctatactgtctgtaactctgataatctctaaagtcactaactgataccatgaaattgagaagatcaaacgctgaagtaattaatttttctgcctcgtttttactacaactagttttcatcaatgtagtgacgatgtattgtttagttacttttggtctaatactgatgatagagatattattgcttcccataatggatcttctagtagtcaccttaaagcccattgatgcgaatagcagatagataaagtcttggtatgactcctttctaatatagtacggactacctttgtcacccaactttatacccacataagccataacaacctctttaatagccgtttcatgaggtttatcagccatgagcctgagtagttggaagaatctcatgaatcccgtctcagaaagtcctatatgcatgatagatttatctttcctgggaaactctcgtatagtcatagatgaaatactctttaaagtttctgaaataagattagtaacagtcttacctccgactactctaggtaacaaacaaactctaataggtgttttctctgcggagataatatcagaaaggatagagcaataagtagtattattgtgattataaagaccgaatacataacaggtagaatttataaacatcatgtcctgaaggtttttagacttgtattcctcgtaatccataccgtcccaaaacatggatttggtaactttgatagccgtagatctttgttccttcgccaacaggttaaagaaattaataaagaatttgttgtttctatttatgtccacaaattgcacgtttggaagcgccacggttacattcactgcagcattttgaggatcgcgagtatgaagtacgatgttattgtttactggtatatctggaaagaaatctaccagtctaggaataagagattgatatcgcatagaaatagtaaagtttataatctcatcatcgaagagcattttgttaccattgtaataaatatccactctgtcatatgtataaatgaagtactgttcaaacatgatgagatgtttatatgttggcatagtagtgagatcgacgtttggtaatggcaatgtattaagattaactccataatgtctagcagcatctgcgatgttataagcgtcgtcaaagcggggtcgatcttgtattgttatatattgtctaacacctataagattatcaaaatcttgtctgcttaatacaccgttaacaatttttgccttgaattcttttattggtgcattaataacatccttatagaggatgttaaacaaataagtgttatcaaagttaagatctggatatttcttttctgctagaacatccattgagtcggagccatctggtttaatataaccaccgataaatctagctctgtattctgtatccgtcaatctaatattaagaaggtgttgagtgaaaggtggaagatcgtaaaagctgtgagtattaatgataggattagtttccgaactaatgttaattggggtattaataatatctatatttccagcgttaagtgtaacattaaacagttttaattcacgtgacgtggtatcaattaaataattaatgcccaatttggatatagcagcctgaagctcatcttgtttagttacggatcctaatgagttattaagcaatatatcgaacggatgaacgaaggttgttttaagttggtcacatactttgtaatctagacatagatgcggaagaacggtagaaactatacgaaataaatattcagagtcctctaattgatcaagagtaactattgacttaataggcatcatttatttagtattaaatgacgaccgtaccagtgacggatatacaaaacgatttaattacagagttttcagaagataattatccatctaacaaaaattatgaaataactcttcgtcaaatgtctattctaactcacgttaacaacgtggtagatagagaacataatgccgccgtagtgtcatctccagaggaaatatcctcacaacttaatgaagatctatttccagatgatgattcaccggccactattatcgaacgagtacaacctcatactactattattgacgatactccacctcctacgtttcgtagagagttattaatatcggaacaacgtcaacaacgagaaaaaagatttaatattacagtatcgaaaaatgctgaagcaataatggaatctagatctatgataacttctatgccaacacaaacaccatccttgggagtagtttatgataaagataaaagaattcagatgttagaggatgaagtggttaatcttagaaatcaacgatctaatacaaaatcatctgataatttagataattttaccaaaatactatttggtaagactccgtacaaatcaacagaagttaataagcgtatagccatcgttaattatgcaaatttgaacgggtcccccttatcagtcgaggacttggatgtttgttcggaggatgaaatagatagaatctataaaacgattaaacaatatcacgaaagtagaaaacgaaaaattatcgtcactaacgtgattattattgtcataaacattatcgagcaggcattgctaaaactcggatttgaagaaatcaaaggactgagtaccgatatcacttcagaaattatcgatgtggagatcggagatgactgcgatgctgtagcatctaaactaggaatcggtaacagtccggttcttaatattgtattgtttatactcaagatattcgttaaacgaattaaaattatttaatttaatacattcccatatccagacaacaatcgtctggattaatctgttcctgtcgtctcataccggacgacatattaatctttttattagtgggcatctttttagatggtttctttttcccagcattaactgagtcgatacctagaagatcgtgattgatctctccgaccattccacgaacttctaattggccgtctctgacggtaccataaactattttaccagcattagtaacagcttggacaatctgaccatccatcgcattgtacgatgtagtagtaactgttgttctacgtctaggagcaccagaagtatttttggagcccttggatgttgatgtagaagaagacgaggattttgattttggtttacatgtaatacattttgaactctttgattttgtatcacatgcgccggcagtcacatctgtttgagaattaagattattgttgcctcctttgacggctgcatctccaccgatttgcgctagtagatttttaagctgtggtgtaatcttattaactgtttcgatataatcatcgtaactgcttctaacggctaaattttttttatccgccatttagaagctaaaaatatttttatttatgcagaagatttaactagattatacaatgaactaatatgatccttttccagattatttacaaacttggtattttttggttctggaggaggcgaatttaaattcggacttggattcggattttgtaagttcttgatcttattatacatcgagtataggatggcgacagtaactgctacacaaataccgatcaaaagaagaataccaatcatttattgacaataacttcactattgatcaagtatgcaatatatcatcttttcactaaataagtagtaataatgattcaacaatgtcgagatatatggacgataataatttagttcatggaaatatcgctatgattggtgtgaatgactccgctaactctgtggggtgcgcagtgctttccccacatagaataaattagcattccgactgtgataataataccaagtataaacgccataatactcaatactttccatgtacgagtgggactggtagacttactaaagtcaataaaggcgaagatacacgaaagaatcaaaagaatgattccagcgattagcacgccggaaaaataatttccaatcataagcatcatgtccatttaactaataaaaattttaaatcgccgaatgaacaaagtggaatataaaccatataaaaacaatagtttgtactgcaaaaataatatctatttttgttttcgaagatatggtaaaattaaatagtagtacacagcatgttataactaacagcagcaacggctcgtaattacttatcatttactagacgaaaaggtggtgggatattttcttgctcaaataatacgaatatatcacccatccattttatgcgatgtttatatactctaatctttaatagatctatagacgacgggtttaccaacaatatagattttatcgattcatctaatttaaacccttccttaaacgtgaatgatctattatctggcataacgatgaccctacctgatgaatcggacaatgtactgggccatgtagaataaattatcaacgaattatcgtctacgaacatttatatcatttgttttaattttaggacgcgaataaatggatataaaatagaaaataacagatattacaaccagtgttatggccgcgcccaaccaggtaggcagttttattttatcttttactacaggttctcctggatgtacgtcaccaacggcggacgtagttctagtacaattagacgtaagttccgcttgggaattttttaacgctaaagagttaacgttaatcgtgcacccaacgtatttacatctagttcgttgaacatcttgattataatataaccattttctatctctagattcgtcagtgcactcatgtaaccaacataccctaggtcctaaatatttatctccggaattagattttggataattcgcgcaccaacaatttctatttcctttatgatcgttacaaaagacgtataatgccgtatccccaaaagtaaaataatcaggacgaataattctaataaactcagaacaatatctcgcatccatatgtttggagcaaatatcggaataagtagacatagccggtttccgttttgcacgtaaccattctaaacaattggggtttccaggatcgtttctacaaaatccagtcatgaaatcgtcacaatgttctgtcttgtaattattattaaatatttttggacagtgtttggtatttgtcttagaacaacattttgccacgctatcactatcgcccaggagataatccttttttataaaatgacatcgttgcccggatgctatataatcagtagcgtgttttaaatccttaatatattcaggagttacctcgttctgataatagattaatgatccaggacgaaatttgaaagaactacatggttctccatgaattaatacatattgtttagcaaattcaggaactataaaactactacaatgatctatcgacataccatctatcaaacaaaacttgggtttaatttctcccggagatgtttcataatagtacgtataactttcttctgcaaacttaacagctctattatattcaggataattaaaacctaattccatatatttgtctcgtatatctgctattcctggtgctattttgattctattaagagtaacagctgcccccattcttaataatcgtcagtatttaaactgttaaatgttggtatatcaacatctaccttatttcccgcagtataaggtttgttgcaggtatactgttcaggaatggttacatttatacttcttctatagtcctgtctttcgatgttcatcacatatgcaaagaacagaataaacaaaataatgtaagaaataatattaaatatctgtgaattcgtaaatacattgattgccataataattacagcagctacaatacacacaatagacattcccacagtgttgccattacctccacgatacatttgagttactaagcaataggtaataactaagctagtaagaggcaatagaaaagatgagataaatatcatcaatatagagattagaggagggctatatagagccaagacgaacaaaatcaaaccgagtaacgttctaacatcattatttttgaagattcccaaataatcattcattcctccataatcgttttgcatcatacctccatctttaggcataaacgattgctgctgttcctctgtaaataaatctttatcaagcactccagcacccgcagagaagtcgtcaagcatattgtaatatcttaaataactcatttatatattaaaaaatgtcactattaaagatggagtataatctttatgccgaactaaaaaaaatgacttgtggtcaacccctaagtctttttaacgaagacggggatttcgtagaagttgaaccgggatcatcctttaagtttctgatacctaagggattttacgcctctccttccgtaaagacgagtctagtattcgagacattaacaacgaccgataataaaatcactagtatcaatccaacaaatgcgccaaagttatatcctcttcaacgcaaagtcgtatctgaagtagtttctaatatgaggaaaatgatcgaatcaaaacgtcctctatacatcactcttcacttggcgtgtggatttggtaagactattaccacgtgttatcttatggctacacacggtagaaaaaccgtcatttgcgtacccaataaaatgttaatacatcaatggaagacacaggtagaggcagtcggattggaacataagatatccatagatggagtaagtagtctattaaaggaactaaagactcaaagtccggatgtattaatagtagtcagtagacatctgacaaacgatgccttttgtaaatatatcaataagcattatgatttgttcatcttggatgaatcacatacgtataatctgatgaacaatacagcagttacaagatttttagcgtattatcctccgatgatgtgttattttttaactgctacacctagaccatctaaccgaatttattgtaacagtattattaatattgccaagttatccaatctaaaaaaaactatctatgcagtagatagtttttttgagccatattccacagataatattagacatatggtaaaacgactagatggaccatctaataaatatcatatatataccgagaagttattatctgtagacgagcctagaaatcaacttattcttgataccctggtagaagaattcaagtcaggaactattaatcgcattttagttattactaaactacgtgaacatatggtattattctacaaacgattattagattttttcggaccagaggttgtatttataggagacgcccaaaatagacgtactccagatatggtcaaatcaatcaaggaactaaatagatttatattcgtatccaccttattttattccggtactggtttagatattcctagtttggattcgttgttcatttgctcggcagtaatcaacaatatgcaaatagagcaattactagggagggtatgtcgagaaacagaactattagataggacggtatatgtatttcctaacacatccatcaaagaaataaagtacatgataggaaatttcatgcaacgaattattagtctgtctgtagataaactaggatttaaacaaaaaagttatcggaaacatcaagaatccgatcccacttctgcatgtacaacatcatccagagaagaacgtgtattaaatagaatatttaactcgcaaaatcgttaagaagtttaagcgacgatccgcatgctgcgcaggccagtgtattacccctcatagtattaatataatccaatgatacttttgtgatgtcggaaatcttaaccaatttagactgacaggcagaacacgtcatgcaatcatcatcgtcatcgataactgtagtcttgggcttctttttgcgactcttcattccggaacgcacattggtgctatccatttaggtagtaaaaaataagtcagaatatgccctataacacgatcgtgcaaaacctggtatatcgtctctatctttatcacaatatagtgtatcgacatttttattattattgacctcgtttatcttggaacatggaatgggaacatttttgttatcaacggccatctttgccttaattccagatgttgtaaaattataactaaacagtctatcatcgacacaaatgaaattcttgtttagacgtttgtagtttacgtatgcggctcgttcgcgtctcattttttcagatattgcaggtactataatattaaaaataagaatgaaataacataggattaaaaataaagttatcatgacttctagcgctgatttaactaacttaaaagaattacttagtctgtacaaaagtttgagattttcagattctgcggctatagaaaagtataattctttggtagaatggggaacatctacttactggaaaataggcgtgcaaaaggtagctaatgtcgagacgtcaatatctgattattatgatgaggtaaaaaataaaccgtttaatattgatccgggctattacattttcttaccggtatattttgggagcgtctttatttattcgaagggtaaaaatatggtagaacttggatctggaaactcttttcaaataccagatgatatgcgaagtgcgtgtaacaaagtattagacagcgataacggaatagactttctgagatttgttttgttaaacaatagatggataatggaagatgctatatcaaaatatcagtctccagttaatatatttaaactagctagtgagtacggattaaacatacccaaatatttagaaattgaaatagaggaagacacattatttgacgacgagttatactctattatagaacgctctttcgatgataaatttccaaaaatatccatatcgtatattaagttgggagaacttagacggcaagttgtagactttttcaaattctcattcatgtatattgagtccatcaaggtagatcgtataggagataatatttttattcctagcgttataacaaaatcaggaaaaaagatattagtaaaagatgtagaccatttaatacgatccaaggttagagaacatacatttgtaaaagtaaaaaagaaaaacacattttccattttatacgactatgatggaaacggaacagaaactagaggagaagtaataaaacgaattatagacactataggacgagactattatgttaacggaaagtatttctctaaggttggtagtgcaggcttaaagcaattgactaataaattagatattaatgagtgcgcaactgtcgatgagttagttgatgagattaataaatccggaactgtaaaacgaaaaataaaaaaccaatcagcatttgatttaagcagagaatgtttgggatatccagaagcggattttataacgttagttaataacatgcggttcaaaatagaaaattgtaaggttgtaaatttcaatattgaaaatactaattgtttaaataacccgagtattgaaactatatatggaaactttaaccagttcgtctcaatctttaatgtcgtcaccgatgtcaaaaaaagattattcgagtgaaataatatgcgcctttgatataggtgcaaaaaatcctgccagaactgttttagaagtcaaggataactccgttagggtattggatatatcaaaattagactggagttctgattgggaaaggcgcatagctaaagatttgtcacaatatgaatacactacagttcttctagaacgtcagcctagaaggtcgccgtatgttaaatttatctattttattaaaggctttttatatcatacatcggctgccaaagttatttgcgtctcgcctgtcatgtctggtaattcatatagagatcgaaaaaagagatcggtcgaagcatttcttgattggatggacacattcggattgcgagactccgttccggatagacgcaaattagacgatgtagcggatagtttcaatttggctatgagatacgtattagataaatggaatactaattatacaccttataataggtgtaaatctagaaattacataaaaaaaatgtaataacgttagtaacgccattatggataatctatttacctttctacatgaaatagaagatagatatgccagaactatttttaactttcatctaataagttgcgatgaaataggagatatatatggtcttatgaaagaacgcatttcctcagaggatatgtttgataatatagtgtataataaagatatacatcctgccattaagaaactagtgtattgcgacatccaacttactaaacacattattaatcagaatacgtatccggtatttaacgattcttcacaagtgaaatgttgtcattatttcgacataaactcagataatagcaatattagctctcgtacagtagagatatttgagagggaaaagtcatctcttgtatcatatattaaaactaccaataagaagagaaaggtcaattacggcgaaataaagaaaactgttcatggaggcactaatgcaaattacttttccggtaaaaagtctgacgagtatctgagtactacagttagatccaacattaatcaaccttggatcaaaaccatctctaagaggatgagagttgatatcattaatcactctatagtaacgcgtggaaaaagctctatattacaaactatagaaattatttttactaatagaacatgtgtgaaaatattcaaggattctactatgcacattattctatccaaggacaaggatgaaaaggggtgtatacacatgattgacaaattattctatgtctattataatttatttctgttgttcgaagatatcatccaaaacgagtactttaaagaagtagctaatgttgtaaaccacgtactcacggctacggcattagatgagaaattattcctaattaagaaaatggctgaacacgatgtttatggagttagcaatttcaaaatagggatgtttaacctgacatttattaagtcgttggatcataccgttttcccctctctgttagatgaggatagcaaaataaagttttttaaggggaaaaagctcaatattgtagcattacgatctctggaggattgtataaattacgtgactaaatccgagaatatgatagaaatgatgaaggaaagatcgactattttaaatagcatagatatagaaacggaatcggtagatcgtctaaaagaattgcttctaaaatgaaaaaaaacactaattcagaaatggatcaacgactagggtataagtttttggtgcctgatcctaaagccggagttttttatagaccgttacatttccaatatgtatcgtattctaattttatattgcatcgattgcatgaaatcttgaccgtcaagcggccactcttatcgtttaagaataatacagaacgaattatgatagaaattagcaatgttaaagtgactcctccagattactcacctataatcgcgagtattaaaggtaagagttatgacgcattagccacgttcactgtaaatatctttaaagaggtaatgaccaaagagggtatatccatcactaaaataagtagttatgagggaaaagattctcatttgataaaaattccgctactaataggatacgggaataaaaatccacttgatacagccaagtatcttgttcctaatgtcataggtggagtctttatcaataaacaatctgtcgaaaaagtaggaattaatctagtagaaaagattacaacatggccaaaatttagggttgttaagccaaactcattcactttctcgttttcctccgtatcccctcctaatgtattaccgacaagatatcgccattacaagatatctctggatatatcacaattggaagcgttgaatatatcatcgacaaagacatttataacggtcaatattgttttgctgtctcaatatttatctagagtgagtctagaattcattagacgtagtttatcatacgatatgcctccagaagttgtctatctagtaaacgcgataatagatagtgctaaacgaattactgaatctattactgactttaatattgatacatacattaatgacctggtggaagctgaacacattaaacaaaaatctcagttaacgatcaacgagttcaaatatgaaatgctgcataactttttacctcatatgaactatacacccgatcaactaaagggattttatatgatatctttactaagaaagtttctctactgtatcttccacacttctagatatccagatagagattcgatggtttgtcatcgcatcctaacgtacggcaaatattttgagacgttggcacatgatgaattagagaattacataggcaacatccgaaacgatatcatgaacaatcacaagaacagaggcacttacgcggtaaacattcatgtactaacaactcccggacttaatcacgcgttttctagcttattgagtggaaagttcaaaaagtcagacggtagttatcgaacacatcctcactattcatggatgcagaatatttctattcctaggagtgttggattttatccggatcaagtaaagatttcaaagatgttttctgtcagaaaataccatccaagtcaatatctttacttttgttcatcagacgttccggaaagaggtcctcaggtaggtttagtatctcaattgtctgtcttgagttccattacaaatatactaacgtctgagtatttggatttggaaaagaaaatttgtgagtatatcagatcatattataaagatgatataagttactttgaaacaggatttccaatcactatagaaaatgctctagtcgcatctcttaatccaaatatgatatgtgattttgtaactgactttagacgtagaaaacggatgggattcttcggtaacttggaggtaggtattactttagttagggatcacatgaatgaaattcgcattaatattggagcgggaagattagtcagaccattcttggttgtggataacggagagctcatgatggatgtgtgtccggagttagaaagcagattagacgacatgacattctctgacattcagaaagagtttccgcatgtcatcgaaatggtagatatagaacaatttacttttagtaacgtatgtgaatcggttcaaaaatttagaatgatgtcaaaggatgaaagaaagcaatacgatttatgtgactttcctgccgaatttagagatggatatgtagcatcttcattagtgggaatcaatcacaattctggacccagagctattcttggatgtgctcaagctaaacaagctatctcttgtctgagctcggatatacgaaataaaatagacaatggaattcatttgatgtatccagagaggccaatcgtgattagtaaggctttagaaacttcaaagattgcggctaattgcttcggccaacatgttactatagcattaatgtcgtacaaaggtatcaatcaagaggatggaattatcatcaaaaaacaatttattcagagaggcggtctcgatattgttacagccaagaaacatcaagtagaaattccattggaaaactttaataacaaagaaagagataggtctaacgcctattcaaaattagaaagtaatggattagttagactgaatgctttcttggaatccggagacgctatggcacgaaatatctcatcaagaactcttgaagatgattttgctagagataatcagattagcttcgatgtttccgagaaatataccgatatgtacaaatctcgcgttgaacgagtacaagtagaacttactgacaaagttaaggtacgagtattaaccatgaaagaaagaagacccattctaggagacaaatttaccactagaacgagtcaaaagggaacagtcgcgtatgtcgcggatgaaacggaacttccatacgacgaaaatggtatcacaccagatgtcattattaattctacatccatcttctctagaaaaactatatctatgttgatagaagttattttaacagccgcatattctgctaagccgtacaacaataagggagaaaaccgacctgtctgttttcctagtagtaacgaaacatccatcgatacatatatgcaattcgctaaacaatgttatgagcattcaaatccgaaattgtccgatgaagaattatcggataaaatcttttgtgaaaagattctctatgatcctgaaacggataagccttatgcatccaaagtattttttggaccaatttattacttgcgtctgaggcatttaactcaggacaaggcaaccgttagatgtagaggtaaaaagacgaagctcattagacaggcgaatgagggacgaaaacgtggaggaggtatcaagttcggagaaatggagagagactgtttaatagcgcatggtgcagccaatactattacagaagttttgaaagattcggaagaagattatcaagatgtgtatgtttgtgaaaattgtggagacatagcagcacaaatcaagggtattaatacatgtcttagatgttcaaaacttaatctctctcctctcttaacaaaaattgataccacgcacgtatctaaagtatttcttactcaaatgaacgccagaggcgtaaaagtcaaattagatttcgaacgaaggcctccttcgttttataaaccattagataaagttgatctcaagccgtcttttctggtgtaatattctagtttggtagtagatacatatcaatatcatcaaattcgagatccgaattataaaatgggcgtggattgttaactatagaatcggacgtctgatattcgaaaatctgtggagtttcaggttttggtggaggtgtaactgctacttgggatactgaagtctgatattcagaaagctgtggatgttctggttcggcatccaccgatggtgtcacatcactaatcggttcggtaacgtctgtggatggaggtgctacttctacagaacctgtagcctcagttgtcaacggagatacatttttaatgcgagaaaatgtataatttggtaatggtttcttatgtggatctgaagaagaggtaagatatctactagaaagataccgatcacgttctagttctcttttgtagaacttaactttttctttctccgcatctagttgatattccaacctcttcacgttactacgttcagattccaattcacgttcgcatgggttacctccgcagtttttacgagcgatttcacgttcagccttcatgcgtctctccctctctctatcgagtttatcagagcagtctttctgaaggcgatcgaactccataaatttctccaacgctttgattgtttccatagatttccgaagttcagcttttaggactgtgattctttttctttcgaattcacagctggatgtacaaccgtttccattaccgccatctctaagtttcttttctagatcggcaacatttcatccccatgccttttacattcctcgagtctactgtcgtcgaaatatcgttccagctccttttcgacatcaataactttagcacgttgtctctcaagctctcttttgtagttatctgattccctggcacgtttaagatcttcatgcaattgagtcagctcttaacttcctctcttgcttcttcgtcatagtacgcgcaatcactgtgagatccattgttaccacgtctacactcggcgagctcgcgtttaagagattcaatttcccgtttgtattggtccatgtttccattgctaccaccattagatttacaggctgctagttgtcgttcgagatcagaaatacgggttttcttggaattgatttcgtcgatgtacttggcatcgaaacacttattaagttctttttccaattctacgattttatttctttcgcgagtcaattccctcctgtagtaactatctgttttgtcagattcacgctctctacgtagactttcttgcaagttactaatttgttccctagcacgtccgagtttagttttatatgctgaatagagttctgattcatcctttgagcagatctctagcgatcgtttaagattcctaattctagtctttagcctatttacctcctcagaagatgttccgttaccgttgcgtttacactcgttaagctgtctatcaagatccatgattctatctctaagacgttgcatctctctttccatatcagcattgctttcattattacgtctgcagtcactcaactgtctttcaatatctgagattctatctctaagacgtcgcatctctctctgtttcggcattggtttcattattacgtttacagtcgttcaactgtctttcaagatctgatattctagattggagtctgctaatctctgtagcattttcacggcattcactcagttgtctttcaagatctgaaattttagattggagtctgctaatctctgtaagatttcctcctccgctctcgatgcagtcggtcaacttattctctagttctctaatacgcgaacgcagtgcatcaacttcttgcgtgtcttcctggttgcgtgtacattcatcgagatctctaacgcgtcgtcgttcttcctcaagttctctgcgtactacagaaagcgtgtccctatcttgttgatatttagcaatttctgattctagagtactgattttgcttacgtagttactaatagttgtcttggccttatcaagatcctccttgtatttgtcgcattccttgatatccctacgaagtctggacagttcccattcgacattacgacgtttatcgatttcagctcggagatcgtcatcgcgttgttttagccacatacgactgagttcaagttctcgttgacaagatccatctacttttccattcctaatagtatccagttccttttctagttctgaacgcatttctcgttccctatcaagcgattctctcaattctcggatagtcttcttatcaatttctaataaatctgaaccatcatctgtcccattttgaatatccctgtgttctttgatctcttttgtaagtcggtcgattctttcggttttataaacagaatccctttccaaagtcctaatcttactgagtttatcactaagttctgcattcaattcggtgagttttctcttggcttcttccaactctgttttaaactctccactatttccgcattcttcctcgcatttatctaaccattcaattagtttattaataactagttggtaatcagcgattcctatagccgttcttgtaattgtgggaacataattaggatcttctaatggattgtatggcttgatagcatcatctttatcattattagggggatggacaaccttaattggttggtcctcatctcctccagtagcgtgtggttcttcaataccagtgttagtaataggcttaggcaaatgcttgtcgtacgcgggcacttcctcatccatcaagtatttataatcgggttctacttcagaatattcttttctaagagacgcgacttcgggagttagtagaagaactctgtttctgtatctatcaacgctggaatcaatactcaagttaaggatagcgaatacctcatcgtcatcatccgtatcttctgaaacaccatcatatgacatttcatgaagtctaacgtattgataaatagaatcagatttagtattaaacagatccttaacctttttagtaaacgcatatgtatattttagatctccagatttcataatatgatcacatgccttaaatgtcagtgcttccatgatataatctggaacactaatgggtgacgaaaaagatacagcaccatatgctacgttgataaataaatctgaaccactaagtagataatgattaatgttaagaaagaggaaatattcagtgtataggtatgtcttggcgtcatatcttgtactaaacacgctaaacagtttgttaatgtgatcaatttccaatagattaattagagcagcgggaataccaacaaacatattaccacatccgtattttctatgaatatcacatatcatgttaaaaaatcttgatagaagagcgaatatctcgtctgacttaatgagtcgtagttcagcagcaacataagtcataactgtaaatagaacatactttcctgtagtgttgattctagactccacatcaacaccattattaaaaatagttttatatacatctttaatctgctctccgttaatcgtcgaacgttctagtatacggaaacactttgatttcttatctgtagttaatgacttagtgatatcacgaagaatattacgaattacatttcttgtttttcttgagagacctgattcagaactcaactcatcgttccatagtttttctacctcagtggcgaaatctttggagtgcttggtacatttttcaataaggttcgtgacctccatttattataaaaaatttattcaaaacttaactacaatcgggtaattataagatcgtagatctcccatgtggcggaatactaccatctatcgcatgtggatggacagtaggtaatggccatgggaacagtaatgtttgcatatttatctttcttgctagtattactgcatattgtcccaatgtttcgatgtgatgttctaacctatcaactgccgctgtatcacaacaatagtgtccgatgaaattaagattatgatccaatgtgtttaatatatgattatcaagtcttatacgatccgcgtcttttttgacaggatcaggttcttctacaggaagaagtttcggcctcttatgatattcatgtctgggaaacggtggtctagggtgaggctccggtatcggagtgggttttggattataatcatcatcgtctatgacatcatcttcgacttcgatatttattttgctatcttgatgatgtcctgtatcagttgcattttcagcactcgactgaatattagcgcattcattgtctattattaccatatttctaaacccaaaatgtatgtgttgaacatcagtactatcgttgatgagtcttatagcatgaattcgcttatcgttatcgggtttatcttctgtcaccttagcaattccttttttattaaactctacataatcatatccatttctattgtttgttctaatataaacgagtatagcatcattgctaaatttttcaatagtatcaaaaacagaatatcctaaaccatataatatatattcaggaacactcaaactaaatgtccaggattctcctaaatacgtaaactttaatagtgcgaaatcattcaaaaatctaccacttatagatagatagtacataaatgcgtatagtagtctacctatctctttattatgaaaaccggcattacgatcatatatgtcgtgatatacctgtgatccgtttacgttaaaccataaatacatgggtgatcctataaacatgaatttatttctaattctcagagctatagttaattgaccgtgtaatatttgcttacatgcatacttgatacgcttattaataagatttttatcattgctcgttatttcagaatcgtatatataaggagtaccatcgtgattcttaccagatattatacaaaatactatatataaaatatattgacccacgttagtaatcatataaatgtttaacgttttaaattttgtattcaatgatccattatcatacgctatcatggtcttgtaatattcattctttaaaatataatattgtgttagccattgcattggagctcctaatggagattttctattctcatccattttaggataggctttcataaagtccctaataacttcgtgaataatgtttctatgttttctactgatgcatgtatttgcttcgatttttttatcccatgtttcatctatcatagatttaaacgcagtaatgctcgcaacattaacatcttgaaccgttggtacaattccgttccataaatttataatgttcgccatttatataactcattttttgaatatacttttaattaacaaaagagttaagttactcatatggacgccgtccagtctgaacatcaatctttttagccagagatatcatagccgctcttagagtttcagcgtgattttccaacctaaatagaacttcatcgttgcgtttacaacacttttctatttgttcaaactttgttgttacattagtaatctttttttccaaattagttagccgttgtttgagagtttcctcattgtcgtcttcatcggctttaacaattgcttcgcgtttagcctctggctttttagcagcctttgtagaaaaaaattcagttgctggaattgcaagatcgtcatctccggggaaaagagttccgtccatttaaagtacagattttagaaactgacactctgcgttatttatatttggtacaacacatggattataaatattgatgttaataacatcagaaaatgtaaagtctatacattgttgcatcgtgttaaattttctaatggatctagtattattgggtccaacttctgcctgaaatccaaatatggaagcggatacaaaaccgtttcctggataaaccacacatctccacttttgctttacatcagaaattgtgtcgttgacatcttgaactctcctatctaatgccggtgttccacctatagattttgaatattcgaatgctgcatgagtagcattaaattccttaatattgccataattttcatatattgagtaaccctggataaaaagtaaacacaccgcagccgtcgctaccacaataaaaaaaattgatagagagttcatttataatctattagaagctgacaaaatttttttacacgcatcagacaatgctttaataaatagttcaacatctacttttgtcatatcgaaccgatggtatgattctaacctagaattacatccgaaaaagttgactatgttcatagtcattaagtcattaacaaacaacattccagactctggattataagacgatactgtttcgtcacaattacctaccttaatcatgtgattatgaatattggctattagagcaccttctaagaaatctataatatctttgaaacacgatttaaaatcaaaccacgaatatacttctacgaagaaagttagtttacccataggagaaataactataaatggagatctaaatacaaaatccggatctatgatagttttaacattattatattctctattaaatacctccacatctaaaaatgttaattttgaaactatgtcttcgtttattaccgtacctgaactaaacgctataagctctattgtttgagaactctttaaacgatattcttgaaatacatgtaacaaagtttcctttaactcggtcggtttatctaccatagttacagaatttgtatccttatctataatataataatcaaaatcgtataaagttatataattatcgcgttcagattgtgatcttttcaaatagactaaaaaccccatttctctagtaagtatcttatgtatatgtttgtaaaatatcttcatggtgggaatatgctctaccgcagttagccattcctcattgacagcggtagatgtattagacaaaactattccaatgtttaacaagggccattttacgagattattaaatccttgtttgataaatgtagccaatgagggttcgagttcaacgacgattgaattctcttcccgcggatgctgcatgatgaacgacgggatgttgttcgattgatttggaattctttttcgactttttgtttatattaaatattttaaaatttatagcggatagcaattcatgtaccacggataatgtagacgcgtattgcgcatcgatatctttattattagataaatttatcaataaatgtgagaagtttgcctcgttaaggtcttccatttaaatattatataaacatttgtgtttgtatcttattcgtcttttatggaatagttttttactagtaaagctgcaattacacactttgtccgtaaaacataaatataaacaccagcttttatcaatcgttccaaaaagtcgacggcggacatttttaacatggcatctattttaaatacacttaggtttttggaaaaaacatcattttataattgtaacgattcaataactaaagaaaagattaagattaaacataagggaatgtcatttgtattttataagccaaagcattctaccgttgttaaatacttgtctggaggaggtatatatcatgatgatttggttgtattggggaaggtaacaattaataatctaaagatgatgctattttacatggatttatcatatcatggagtgacaagtagtggagcaatttacaaattgggatcgtctatcgatagactttctctaaataggactattgttacaaaagttaataattatgatgatacattttttgacgacgatgattgatcgctattgcacaattttgtttttgtactttctaatatagtgtttaggttctttttcatatgagaatattgatttactaaaatatctatgtttaacttttgttctatgacgtccttatcggcggtatcggtacatatacgtaattcaccttcacaaaatacggagtcttcgataataatagccaatcgattattggatctagctgtctgtatcatattcaacatgtttaatatatcctttcgtttcccctttacaggcatcgatcgtagcatattttccgcgtctgatatggaaatgttaaaactacaaaaatgcgtaatgttagcccgtcctaatattggtacgtgtctataagtttggcatagtagaataatagacgtgtttaaatgccttccaaagtttaagaattctattagagtattgcattttgatagtttatcgcctacatcatcaaaaataagtaaaaagtgtgctgattttttatgattttgtgcgacagcaatacatttttctatgttacttttagttcgtatcagattatattctagagattcctgactactaacgaaattaatatgatttggccaaatgtatccatcataatctgggttataaacgggtgtaaacaagaatatatgtttatattttttaactagtgtagaaaacagagatagtaaatagatagtttttccagatccagatcctcctgttaaaaccattctaaacggcatttttaataaattttctcttgaaaattgtttttcttggaaacaattcataattatatttacagttactaaattaatttgataataaatcaaaatatggaaaactaaggttgttagtagggaggagaacaaagaaggcacatcgtgatataaataacatttattatcatgatgacaccagaaaacgacgaagagcagacatctgtgttctccgctactgtttacggagacaaaattcagggaaagaataaacgcaaacgcgtgattggtctatgtattagaatatctatggttatttcactactatctatgattaccatgtccgcgtttctcatagtgcgcctaaatcaatgcatgtctgctaacgaggctgctattactgacgccgctgttgccgttgctgctgcatcatctactcatagaaaggttgcgtctagcactacacaatatgatcacaaagaaagctgtaatggtttatattaccagggttcttgttatatattacattcagactaccagttattctcggatgctaaagcaaattgcactgcggaatcatcaacactacccaataaatccgatgtcttgactacctggctcattgattatgttgaggatacatggggatctgatggtaatccaattacaaaaactacatccgattatcaagattctgatgtatcacaagaagttagaaagtatttttgtgttaaaacaatgaactaatatttatttttgtacattaataaatgaaatcgcttaatagacaaactgtaagtaggtttaagaagttgtcggtgccggccgctataatgatgatactctcaaccattattagtggcataggaacatttctgcattacaaagaagaactgatgcctagtgcttgcgccaatggatggatacaatacgataaacattgttatttagatactaacattaaaatgtctacagataatgcggtttatcagtgtcgtaaattacgagctagattgcctagacctgatactagacatctgagagtattgtttagtattttttataaagattattgggtaagtttaaaaaagaccaatgataaatggttagatattaataatgataaagatatagatattagtaaattaacaaattttaaacaactaaacagtacgacggatgctgaagcgtgttatatatacaagtctggaaaactggttaaaacagtatgtaaaagtactcaatctgtactatgtgttaaaaaattctacaagtgacaacaaaaaatgaattaataataagtcgttaacgtacgccgccatggacgccgcgtttgttattactccaatgggtgtgttgactataacagatacattgtatgatgatctcgatatctcaatcatggactttataggaccatacattataggtaacataaaaactgtccaaatagatgtacgggatataaaatattccgacatgcaaaaatgctactttagctataagggtaaaatagttcctcaggattctaatgatttggctagattcaacatttatagcatttgtgccgcatacagatcaaaaaataccatcatcatagcatgcgactatgatatcatgttagatatagaagataaacatcagccattttatctattcccatctattgatgtttttaacgctacaatcatagaagcgtataacctgtatacagctggagattatcatctaatcatcaatccttcagataatctgaaaatgaaattgtcgtttaattcttcattctgcatatcagacggcaatggatggatcataattgatgggaaatgcaatagtaattttttatcataaaagttgtaaagtaaataataaaacaataaatattgaactagtagtacgtatattgagcaatcagaaatgatgctggtacctcttatcacggtgaccgtagttgcgggaacaatattagtatgttatatattatatatttgtaggaaaaagatacgtactgtctataatgacaataaaattatcatgacaaaattaaaaaagataaagagttctaattccagcaaatctagtaaatcaactgatagcgaatcagactgggaggatcactgtagtgctatggaacaaaacaatgacgtagataatatttctaggaatgagatattggacgatgatagcttcgctggtagtttaatatgggataacgaatccaatgttatggcgcctagcacagaacacatttacgatagtgttgctggaagcacgctgctaataaataatgatcgtaatgaacagactatttatcagaacactacagtagtaattaatgaaacggagactgttgaagtacttaatgaagataccaaacagaatcctaactattcatccaatcctttcgtaaattataataaaaccagtatttgtagcaagtcaaatccgtttattacagaacttaacaataaatttagtgagaataatccgtttagacgagcacatagcgatgattatcttaataagcaagaacaagatcatgaacacgatgatatagaatcatcggtcgtatcattggtgtgattagtttcctttttataaaattgaagtaatatttagtattattgctgccgtcacgttgtacaaatggagatattccctgtattcggcatttctaaaattagcaattttattgctaataatgactgtagatattatatagatacagaacatcaaaaaattatatctgatgagatcaatagacagatggatgaaacggtacttcttaccaacatcttaagcgtagaagttgtaaatgacaatgagatgtaccatcttattcctcatagattatcgacgattatactctgtattagttctgtcggaggatgtgttatctctatagataatgacatcaatggcaaaaatattctaacctttcccattgatcatgctgtaatcatatccccactgagtaaatgtgtcgtagttagcaagggtcctacaaccatattggttgttaaagcggatatacctagcaaacgattggtaacatcgtttacaaacgacatactatatgtaaacaatctgtcactgattaattatttgccgttgtctgtattcattattagacgagtcaccgactatttggatagacacatatgcgatcagatatttgctaataataagtggtattcccttataaccatcgacgataagcaatatcctattccatcaaactgtataggtatgtcctctgccaagtacataaattctagcatcgagcaagatactttaatccatgtttgtaacctcgagcatccgttcgactcagtatacaaaaaaatgcagtcgtacaattctctacctatcaaggaacaaatattgtacggtagaattgataatataaatatgagcattagtatttctgtggattaatagatttctagtatggggatcattaatcatctctaatctctaaatacctcataaaacgaaaaaaaagctattatcaaatactgtacggaatggattcattctcttctctttttatgaaactctgttgtatatctactgataaaactggaagcaaaaaatctgatagaaagaataagaataagatcaaggattatatggaacacgattattataaaataacaatagttcctggttcctcttccacgtctactagctcgtggtattatacacatgcctagtaatagtctctttgcgttgacggaaagcagactagaaataacaggctaaaatgttcagacaccataatagttcccaacccagataataacagagttccatcaacacattcctttaaactcaatcccaaacccaaaaccgttaaaatgtatccggccaattgatagtagataatgaggtgtacagcgcatgataatttacacagtaaccaaaatgaaaatactttagtaattataagaaatatagacggtaatgtcatcatcaacaatccgataatatgcctgagagtaaacattgacggataaaacaaaaatgctccgcataactctatcatggcaataacacaaccaaatacttgtaagattcctaaattagtagaaaatacaacgaatatcgatgtataagtgatctcgagaaataataagaataaagtaatgcccgtaaagataaacatcaacattgtttggtaatcattaaaccaattagtatgaagttgaactaatttcacagtagattttattccagtgttatcctcgcatgtataagtacctggtaagatatctttatattccataatcaatgagacatcactatctgataacgaatgaagtctagcactagtatgccatttacttaatattgtcgtcttggaagttttattataagttaaaatatcatggttatccaatttccatctaatatactttgtcggattatctatagtacacggaataatgatggtatcattacatgctgtatactctatggtctttgtagttgttataacaaccaacgtatagaggtatatcaacgatattctaactcttgacattttttatttatttaaaatgatacctttgttatttattttattctattttgctaacggtattgaatggcataagtttgaaacgagtgaagaaataatttctacttacttattagacgacgtattatacacgggtgttaatggggcggtatacacattttcaaataataaactaaacaaaactggtttaactaataataattatataacaacatctataaaagtagaggatgcggataaggatacattagtatgcggaaccaataacggaaatcccaaatgttggaaaatagacggttcagacgacccaaaacatagaggtagaggatacgctccttatcaaaatagcaaagtaacgataatcagtcacaacggatgtgtactatctgacataaacatatcaaaagaaggaattaaacgatggagaagatttgacggaccatgtggttatgatttattcacggcggataacgtaattccaaaagatggtttacgaggagcattcgtcgataaagacggtacttatgacaaagtttacattcttttcactgatactatcggctcaaagagaattgtcaaaattccgtatatagcacaaatgtgcctaaacgacgaaggtggtccatcatcattgtctagtcatagatggtcgacgtttctcaaagtcgaattagaatgtgatatcgacggaagaagttatagacaaattattcattctagaactataaaaacagataatgatacgatactatatgtattcttcgatagtccttattccaagtccgcattatgtacctattctatgaataccattaaacaatctttttctacgtcaaaattggaaggatatacaaagcaattgccgtctccagctcctggtatatgtttaccagctggaaaagttgttccacataccacgtttgaagtcatagaacaatataatgtactagatgatattataaagcctttatctaaccaacctatcttcgaaggaccgtctggtgttaaatggttcgatataaaggagaaggaaaatgaacatcgggaatatagaatatacttcataaaagaaaattctatatattcgttcgatacaaaatctaaacaaactcgtagctcgcaagtcgatgcgcgactattttcagtaatggtaactgcgaaaccgttatttatagcagatatagggataggagtaggaatgccacaaatgaaaaaaatacttaaaatgtaatcttaatcgagtacaccacacgacaatgaacaaacataagacagattatgctggttatgcttgctgcgtaatatgcggtctaattgtcggaattatttttacagcgacactattaaaagttgtagaacgtaaattagttcatacaccattaatagataaaacgataaaagatgcatatattagagaagattgtcctactgactggataagctataataataaatgtatccatttatctactgatcgaaaaacctgggaggaaggacgtaatgcatgcaaagctctaaattcaaattcggatctaattaagatagagactccaaacgagttaagttttttaagaagccttagacgaggctattgggtaggagaatccgaaatattaaaccagacaaccccatataattttatagctaagaatgccacgaagaatggaactaaaaaacggaaatatatttgtagcacaacgaatactcccaaactgcattcgtgttacactatataacaattacactacatttttatcataccactacttcggttagatgttttagaaaaaaataaatatcgccgtaccgttcttgtttttataaaaataacaattaacaattatcaaattttttctttaatattttacgtggttgaccattcttggtggtaaaataatctcttagtgttggaatggaatgctgtttaatgtttccacactcatcgtatattttgacgtatgtagtcacatcgtttacgcaatagtcagactgtagttctatcatgcttcctacatcagaaggaggaacagttttaaagtctcttggttttaatctattaccgttagttttcatgaaatcctttgttttatccacttcacattttaaataaatgtccactatacattcttttgttaattttactagatcgtcatgggtcatagaatttataggttccgtagtccatggatccaaactagcaaacttcgcgtatacggtatcgcgattagtgtatacaccaactgtatgaaaattaagaaaacagtttaataaatcaacagaaatatttaatcctccgtttgatacagatgcgccatatttatggatttcggattcacacgttgtttgtctgaggtgttcgtctagtgttgcttctacgtaaacttcgattcccatatattctttattgtcagaatcgcataccgatttatcatcatacactgtttgaaaactaaatggtatacacatcaaaataataaataataacgagtacattctgcaatattgttatcgtaattggaaaaatagtgttcgagtgagttggattatgtgagtattggattgtatattttattttatattttgtaataagaataaaatgctaatgtcaagtttattccaatagatgtcttattaaaaacatatataataaataacaatggctgaatggcataaaattatcgaggatatctcaaaaaataataagttcgaggatgccgccatcgttgattacaagactacaaagaatgttctagctgctattcctaacagaacatttgccaagattaatccgggtgaaattattcctctcatcactaatcgtaatattctaaaacctcttattggtcagaaatattgtattgtatatactaactctctaatggatgagaacacgtatgctatggagttgcttactgggtacgcccctgtatctccgatcgttatagcgagaactcataccgcacttatatttttgatgggtaagccaacaacatccagacgtgacgtgtatagaacgtgtagagatcacgctacccgtgtacgtgcaactggtaattaaaataaaaagtaatattcatatgtagtgtcaattttaaatgatgatgatgaaatggataatatccatattgacgatgtcaataatgccggtattggcatacagttcatcgatttttagatttcattcagaggatgtggaattatgttatgggcatttgtattttgataggatctataatgtagtaaatataaaatataatccgcatattccatatagatataattttattaatcgcacgttaaccgtagatgaactagacgataatgtcttttttacacatggttattttttaaaacacaaatatggttcacttaatcctagtttgattgtctcattatcaggaaacttaaaatataatgatatacaatgctcagtaaatgtatcgtgtctcattaaaaatttggcaacgagtacatctactatattaacatctaaacataagacttattctctacatcggtccacgtgtattactataataggatacgattctattatatggtataaagatataaatgacaagtataatgacatctatgattttactgcaatatgtatgctaatagcgtctacattgatagtgaccatatacgtgtttaaaaaaataaaaatgaactcttaattatgctatgctattagaaatggataaaatcaaaattacggttgattcaaaaattggtaatgttgttaccatatcgtataacttggaaaagataactattgatgtcacacctaaaaagaaaaaagaaaaggatgtattattagcgcaatcagttgctgtcgaagaggcaaaagatgtcaaggtagaagaaaaaaatattatcgatattgaagatgacgatgatatggatgtagaaagcgcgtaatacgatctataaaaataagtatataaatactttttatttactgtactcttactgtgtagtggtgataccctactcgattatttttttaaaaaaaaaatacttattctgattcttctagccatttccgtgttcgtttgaatgccacatcgacgtcaaagataggggagtagttgaaatctagttctgcattgttggtacgcacctcaaatgtagtgttggatatcttcaacgtatagttgttgagtagtgatggttttctaaatagaattctcttcatatcattcttgcacgcgtacatttttagcatccatcttggaatcctagatccttgttctattcccaatggtttcatcaatagaagattaaacatatcgtacgaacacgatggagagtaatcgtagcaaaagtaagcatttcctttaatcttagatcccggatactggatatattttgcagccaacacgtgcatccatgcagcatttcctacatatacccggctatgcaccgcgtcatcatcgactgtacgatacataatgttaccgtgttgcttacattgctcgtaaaagactttcatcaatttgtctccttctccgtaaattccagtgggtcttaggcaacaagtatacaattttgctccattcatgattacggaattattggctttcataaccagttgctcggccatacgtttactttttgcgtatacatgtcctggtgatatatcataaagggtatgctcatggccgatgaatggatcaccgtgtttattgggtcctattgcttccatgctactagtatagatcaaatacttgattcctaggtccacacaagctgccaaaatagtctgtgttccataatagtttactttcatgatttcattatcggtgtattttccaaatacatccactagagcagccgtatgaataatcagatttaccccatctagcgcttctctcaccttatcaaagtcgtttatatcacattgtatatagtttataaccttaactttcgaggttattggttgtggatcttctacaatatctatgactctgatttcttgaacatcatctgcactaattaacagttttactatatacctgcctagaaatccggcaccaccagtaaccgcgtacacggccattgctgccactcataatatcagactacttattctattttactaaataatggctgtttgtataatagaccacgataatatcagaggagttatttactttgaaccagtccatggaaaagataaagttttaggatcagttattggattaaaatccggaacgtatagtttgataattcatcgttacggagatattagtcaaggatgtgattccataggcagtccagaaatatttatcggtaacatctttgtaaacagatatggtgtagcatatgtttatttagatacagatgtaaatatatttacaattattggaaaggcgttatctatttcaaaaaatgatcagagattagcgtgtggagttattggtatttcttacataaatgaaaagataatacattttcttacaattaacgagaatggcgtttgatatatcagttaatgcgtctaaaacaataaatgcattagtttacttttctactcagcaaaataaattagtcatacgtaatgaagttaatgatacacactacactgtcgaatttgatagggacaaagtagttgacacgtttatttcatataatagacataatgacaccatagagataagaggggtgcttccagaggaaactaatattggttgcgcggttagtatgacttacttgtataataagtatagttttaaactgattttagcagaatatataagacacagaaatactatatccggcaatatttattcggcattgatgacactagatgatttggctattaaacagtatggagacattgatctattatttaatgagaaacttaaagtagactccgattcgggactatttgactttgtcaactttgtaaaggatatgatatgttgtgattctagaatagtagtagctctatctagtctagtatctaaacattgggaattgacaaataaaaaatataggtgtatggcattagccgaacatatatctgatagtattccaatatctgagctatctagactacgatacaatctatgtaagtatctacgcggacacactgagagcatagaggataaatttgattattttgaagacgatgattcgtctacatgttctgccgtaaccgacagggaaacggatgtataattttttttatagcgtgaaggatatgataaaaaatataattgttgtatttatcccattccaatcaccttatatgattctgtaacacaataaaggagtcttatagatgtatagaggtcagatactggtttgataaactgtttattccacataagtatgtttgactttatggttagacccgcatactttaacaaatcactgaaaattggagttaggtattgacctctcagaatcagttgccgttctggaacattaaatgtattttttatgatatactccaacgcatttatgtgggcatacaacaagtcattactaatggaatattccaagagttttagttgtctagtatttaacaagagaagagatttcaacagactgtttatgaactcgaatgccgcctcattgtcgcttatattgatgatgtcgaattctcccaatatcatcaccgatgagtagctcatcttgttatcgggatccaagttttctaaagatgtcattaaaccctcgatcatgaatggatttatcatcatcgtttttatgttggacatgagcttagtccgtttgtccacatctatagaagatgatttctgaattatttcatatatctctctctttaactccaggaacttgtcaggatggtctactttaatatgttctcgtctaagagatgaaaatctttggatggttgcacgcgacttttctctaaaggatgacgttgcccaagatcctctcttaaatgaatccatcttatccttggacaagatggacagtctattttccttagatggtttaatatttttgttacccatgatctataaaggtagacctaatcgtctcggatgaccatatatttattttcagttttattatacgcataaattgtaaaaaatatgttaggtttacgaaaatgtctcgtggggcattaatcgtttttgaaggattggacaaatctggaaaaacaacacaatgtatgaacatcatggaatcaataccttcaaacacaataaaataccttaactttcctcagagatccactgtcactggaaagatgatagatgactatctaactcgtaaaaaaacctataatgatcatatagttaatctattattttgtgcaaatagatgggagtttgcatcttttatacaagaacaactagaacagggaattactttaatagttgatagatacgcattttctggagtagcgtatgccgccgctaaaggcgcgtcaatgactctcagtaagagttatgaatctggattgcctaaacccgacttagttatattcttggaatctggtagcaaagaaattaatagaaacgtcggtgaggaaatttatgaagatgttacattccaacaaaaggtattacaagaatataaaaaaatgattgaagaaggagatattcattggcaaattatttcttctgaattcgaggaagatgtaaagaaggagttgattaagaatatagttatagaggctatacacacggttactggaccagtggggcaactgtggatgtaatagtgaaattacattttttataaatagatgttagtacagtgttataaatggatgaagcatattactctggcaacttggaatcagtactcggatacgtgtccgatatgcataccgaactcgcatcaatatctcaattagttattgccaagatagaaactatagataatgatatattaaacaaggacattgtaaattttatcatgtgtagatcaaacttggataatccatttatctctttcctagatactgtatatactattatagatcaagagaactatcagactgagttgattaattcattagacgacaatgaaattatcgattgtatagttaataagtttatgagcttttataaggataacctagaaaatatagtagatgctatcattactctaaaatatataatgaataatccagattttaaaactacgtatgccgaagtactcggttccagaatagccgatatagatattaaacaagtgatacgtaagaatatactacaattgtctaataatatccgcgaacgatatttgtgaaaatattaaaaaaaaatactttttttattaaatgacgtcttttcgtgaatttagaaaattatgctgtgctatatatcacgcatcaggatataaagaaaaatctaaattaattagagactttataacagatagggatgataaatatttgatcattaagctattgcttcccggattagacgatagaatttataacatgaacgataaacaaattataaaattatatagtataatatttaaacaatctcaggaagatatgctacaagatttaggatacggatatataggagacactattaggactttcttcaaagagaacacagaaatccgtccacgagataaaagcattttaactttagaagaagtggatagttttttaactacgttatcatccgtaactaaagaatcgcatcaaataaaattattgactgatgtagcatctgtttgtacatgtaatgatttaaaatgtgtagtcatgcttattgataaagatctaaaaattaaagcgggtcctcggtacgtacttaacgctattagtcctaatgcctatgatgtgtttagaaaatctaataacttgaaagagataatagaaaattcatctaaacaaaatctagactctatatctatttctgttatgactccaattaatcccatgttagcggaatcgtgtgattctgtcaataaggcgtttaaaaaatttccatcaggaatgtttgcggaagtcaaatacgatggtgaaagagtacaagttcataaaaataataacgagtttgccttctttagtagaaacatgaaaccagtactctctcataaagtggattatctcaaagaatacataccgaaagcatttaaaaaagctacgtctatcgtattggattctgaaattgttcttgtagacgaacataatgtaccgctcccgtttggaagtttaggtatacacaaaaagaaagaatataaaaactctaacatgtgtttgttcgtgtttgactgtttgtactttgatggattcgatatgacggacattccattgtacgaacgaagatcttttctcaaagatgttatggttgaaatacccaatagaatagtattctcagagttgacgaatattagtaacgagtctcagttaactgacgtattggatgatgcactaacgagaaaattagaaggattggtcttaaaagatattaatggagtatacgaaccgggaaagagaagatggttaaaaataaagcgagactatttgaacgagggttccatggcagattctgccgatttagtagtactaggtgcctactatggtaaaggagcaaagggtggtatcatggcagtctttctaatgggttgttacgacgatgaatccggtaaatggaagacggttaccaagtgttcaggacacgatgataatacgttaagggagttgcaagaccaattaaagatgattaaaattaacaaggatcccaaaaaaattccagagtggttagtagttaataaaatctatattcccgattttgtagtagaggatccgaaacaatctcagatatgggaaatttcaggagcagagtttacatcttccaagtcccataccgcaaatggaatatccattagatttcctagatttactaggataagagaggataaaacgtggaaagaatctactcatctaaacgatttagtaaacttgactaaatcttaatagttacatacaaactgaaaattaaaataacactatttagttggtggtcgccatggatggtgttattgtatactgtctaaacgcgctagtaaaacatggcgaggaaataaatcatataaaaaatgatttcatgattaaaccatgttgtgaaagagtttgtgaaaaagtcaagaacgttcacattggcggacaatctaaaaacaatacagtgattgcagatttgccatatatggataatgcggtatccgatgtatgcaattcactgtataaaaagaatgtatcaagaatatccagatttgctaatttgataaagatagatgacgatgacaagactcctactggtgtatataattattttaaacctaaagatgccattcctgttatcatatctataggaaaggataaagatgtctgtgaactattaatctcatcagacatatcgtgtgcatgcgtggagttaaattcatatcacgtagccattcttcccatggatgtttccttttttaccaaaggaaatgcatcattgattattctcctgtttgatttctctatcgatgcggcacctctcttaagaagtgtaaccgataataatgttattatatctagacaccagcgtctacatgacgagcttccgagttccaattggttcaagttttacataagtataaagtccgactattgttctatattatatatggttgttgatggatctgtgatgcatgcgatagctgataatagaactcacgcaattattagcaaaaatatattagacaatactacgattaacgatgagtgtagatgctgttattttgaaccacagattaggattcttgatagagatgagatgctcaatggatcatcgtgtgatatgaacagacattgtattatgatgaatttacctgatgtaggcgaatttggatctagtatgttggggaaatatgaacctgacatgattaagattgctctttcggtggctggtaatttaataagaaatcgagactacattcccgggagacgaggatatagctactacgtttacggtatagcctctagataatttttttaagcacgaaataaaaaacataattttaaaccaatctatttcatactattttgtgtgatcaccatggacataaagatagatattagtatttctggtgataaatttacggtgactactaggagggaaaatgaagaaagaaaaaaatatctacctctccaaaaagaaaaaactactgatgttatcaaacctgattatcttgagtacgatgacttgttagatagagatgagatgtttactattctagaggaatattttatgtacagaggtctattaggcctcagaataaaatatggacgactctttaacgaaattaaaaaattcgacaatgatgcggaagaacaattcggtactatagaagaactcaagcagaaacttagattaaattctgaagagggagcagataactttatagattatataaaggtacaaaaacaggatatcgtcaaacttactgtatacgattgcatatctatgataggattgtgtgcatgcgtggtagatgtttggagaaatgagaaactgttttctagatggaaatattgtttacgagcgattaaactgtttattgatgatcacatgcttgataagataaaatctatactgcagaatagactagtatatgtggaaatgtcatagaaagttaaaagttaatgagagcaaaaatatataaggttgtattccatatttgttatttttttctgtaatagttagaaaaatacattcgatggtctatctatcagattattatgtgttataaggtactttttctcataataaactagagtatgagtaagatagtgtttttcaaaacatataaatctaaaattgatggatgagatatacagctattaatttcgaaaatatattttaatctgataactttaaacatggatttttaatggtggtttaacgttttaaaaaaagattttgttattgtagtatatgataatattaaaagatggatataaagaatttgctgactgcatgtactattttttacattactacattggctacggcagatatacctacttcgtcactgccacacgctccggtaaacggggcatgtgacgagggagaatatcttgataagaggcataatcaatgttgtaatcagtgtccacctggagaatttgccaaggttagatgtaatggtaacgataacacaaaatgtgaacgctgcccacctcatacatataccgcaatccccaattactctaatggatgtcatcaatgtagaaaatgcccaacaggatcatttgataaggtaaagtgtaccggaacacagaacagtaaatgttcgtgtcttcctggttggtattgcgctactgattcttcacagactgaagattgtcgagattgtataccaaaaaggagatgtccatgcggatactttggtggaatagatgaacaaggaaatcctatttgtaaatcgtgttgtgttggtgaatattgcgactacctacgtaattatagacttgatccatttcctccatgcaaactatctaaatgtaattaattatgattttgatgataatgttaccatacattatatcgctacttggttagtgtattattcagtatgaagacctattaataattacttatcttttgacgatcttgttataattataatataaaaatacttatggcatagtaactcataattgctgacgcgataaattcgtaataatctgttttgttcaaatttttataaggaatctacaggcataaaaataaaaatataatttataatatactcttacagcgcgccatcatgaataacagcagtgaattgattgctgttattaatggatttagaaatagtggacgattttgtgatattaatatagttattaatgatgaaaggataaacgctcacagactcatcctatctggagcctccgaatatttttccattctgttttccaataattttatcgattctaatgaatacgaagttaatctaagtcatttagattatcaaagtgttaacgatttgatcgattacatttatgggatacctttgagcctaactaacgataacgtgaaatatattctttcaaccgctgattttttacaaattggatctgctattacggagtgtgaaaattacatacttaaaaatctttgttctagaaactgtatcgatttctacatatacgctgataaatataataacaagaaaatagaatcagcgtcgtttaacacaatattacaaaatattttgagactcatcaacgatgaaaactttaaatacttaacagaggaatcaatgataaaaattttaagcgatgatatgttaaatataaaaaatgaggatttcgccccactaattctcattaaatggttagagagtactcaacaaccatgcaccgtcgagttacttaaatgcctcagaatatcattgctttccccacaagttataaaatcactttatagtcatcgactggttagttcaatctacgaatgtataacattcttaaacaatatagcattcttggatgaatcatttcctagataccatagcatcgagttgatatctatcggtataagtaattcgcatgataagatttccataaactgctacaatcataaaaaaaatacatgggaaatgatatcttcacgtagatataggtgtagtttcgcagtggccgtcctggataatattatctatatgatgggtggatatgatcagtccccgtatagaagttcaaaggttatagcgtacaatacatgtacaaattcttggatatatgatataccagagctaaaatatcctcgttctaattgtgggggactggctgatgacgaatacatttattgtataggcggcatacgcgatcaggattcatcgttgacatctagtattgatagatggaagccatcaaaaccatattggcagaagtatgctaaaatgcgcgaaccaaaatgtgatatgggggttgcgatgttaaacggattaatatatgttataggtggaatcgttaaaggtgacacgtgtaccgacgcactagagagtttatcagaagatggatggatgaagcatcaacgtcttccaataaaaatgtccaatatgtcgacgattgttcatgatggcaagatttatatatctggaggttacaacaatagtagtgtagttaatgtaatatcgaatctagtccttagctataattcgatatatgatgaatggaccaaattatcatcattaaacattcctagaattaatcccgctctatggtcagcgcataataaattatatgtaggaggaggaatatctgatgatgttcgaactaatacatctgagacatacgacaaagaaaaagattgttggacattggataatggtcacgtgttaccacgcaattatataatgtataaatgcgaaccgattaaacataaatatccattggaaaaaacacagtacacgaatgattttctaaagtatttggaaagttttataggtagttgatagaacaaaatacataattttgtaaaaataaatcactttttatactaatatgacacgattaccaatacttttgttactaatatcattagtatacgctacaccttttcctcagacatctaaaaaaataggtgatgatgcaactctatcatgtaatcgaaataatacaaatgactacgttgttatgagtgcttggtataaggagcccaattccattattcttttagctgctaaaagcgacgtcttgtattttgataattataccaaggataaaatatcttacgactctccatacgatgatctagttacaactatcacaattaaatcattgactgctagagatgccggtacttatgtatgtgcattctttatgacatcaactacaaatgacactgataaagtagattatgaagaatactccacagagttgattgtaaatacagatagtgaatcgactatagacataatactatctggatctacacattcaccggaaactagttctgagaaacctgattatatagataattctaattgctcgtcggtattcgaaatctaagctcttttttttttttttttttttggcatataaataagtcgaccaccatggtgggtgaggatagcgtgctgatcaccgagaacatgcacatgaaactgtacatggagggcaccgtgaacgaccaccacttcaagtgcacatccgagggcgaaggcaagccctacgagggcacccagaccatgaagatcaaggtggtcgagggcggccctctccccttcgccttcgacatcctggctaccagcttcatgtacggcagcaaaacctttatcaaccacacccagggcatccccgacttctttaagcagtccttccctgagggcttcacatgggagaggatcaccacatacgaagacgggggcgtgctgaccgctacccaggacaccagcctccagaacggctgcctcatctacaacgtcaagatcaacggggtgaacttcccatccaacggccctgtgatgcagaagaaaacactcggctgggaggccagcaccgagatgctgtaccccgctgacagcggcctgagaggccatagccagatggccctgaagctcgtgggcgggggctacctgcactgctccctcaagaccacatacagatccaagaaacccgctaagaacctcaagatgcccggcttctacttcgtggacaggagactggaaagaatcaaggaggccgacaaagagacctacgtcgagcagcacgagatggctgtggccaggtactgcgacctgcctagcaaactggggcacagctgattaattaatttttatcgatctaattcaacaatgtctggagagcttcgcaggatcccgactccggaaccaattactgataaagaagatcatacagttacagacactgtctcatacactacagtaagtacatcatctggaattgtcactactaaatcaaccaccgatgatgcggatctttatgatacgtacaatgataatgatacagtaccaccaactactgtaggcggtagtacaacctctattagcaattataaaaccaaggactttgtagaaatatttggtattaccgcattaattatattgtcggccgtggcaattttctgtattacatattatatatataataaacgttcacgtaaatacaaaacagagaacaaagtctagatttttgacttacataaatgtctgggatagtaaaatctatcatattgagcggaccatctggtttaggaaagacagccatagccaaaagactatgggaatatatttggatttgtggtgtcccataccactagatttcctcgtcctatggaacgagaaggtgttgattaccattacgttaacagagaggccatctggaagggaatagccgccggaaactttctagaacatactgagtttttaggaaatatttacggaacttctaaaacagctgtgaatacagcggctattaataatcgtatttgtgtgatggatctaaacatcgacggtgttagaagtcttaaaaatacgtacctaatgccttactcggtgtatataagacctacctctcttaaaatggttgagaccaagcttcgtcgtagaaacactgaagctaacgatgagattcatcgtcgtgtgatgttggcaaaaactgacatggatgaggcaggtgaagccggtctattcgacactattatcattgaagatgatgtgaatttagcatatagtaagttaattcagatactacaggaccgtattagaatgtattttaacactaattagagacttaagacttaaaacttgataattaataatataactcgtttttatatgtgtctatttcaacgtctaatgtattagttaaatattaaaacttaccacgtaaaacttaaaatttaaaatgatatttcattgacagatagatcacacattatgaactttcaaggacttgtgttaactgacaattgcaaaaatcaatgggtcgttggaccattaataggaaaaggtggattcggtagtatttatactactaatgacaataattatgtagtaaaaatagagcccaaagctaacggatcattatttaccgaacaggcattttatactagagtacttaaaccatccgttatcgaagaatggaaaaaatctcacaatataaagcacgtaggtcttatcacgtgcaaggcatttggtctatacaaatccattaatgtggaatatcgattcttggtaattaatagattaggtgcagatctagatgcggtgatcagagccaataataatagactaccaaaaaggtcggtgatgttgatcggaatcgaaatcttaaataccatacaatttatgcacgagcaaggatattctcacggagatattaaagcgagtaatatagtcttagatcaaatagataagaataaattatatctagtggattacggattggtttctaaattcatgtctaatggcgaacatgttccatttataagaaatccaaataaaatggataacggtactctagaatttacacctatagattcgcataaaggatacgttgtatctagacgtggagatctagaaacacttggatattgtatgattagatggttgggaggtatcttaccatggactaagatatctgaaacaaagaattgtgcattagtaagtgccacaaaacagaaatatgttaacaatactgcgactttgttaatgaccagtttgcaatatgcacctagagaattgctgcaatatattaccatggtaaactctttgacatattttgaggaacccaattacgacaagtttcggcacatattaatgcagggtgtatattattaagtgtggtgtttggtcgataaaaattaaaaaataacttaatttattattgatctcgtgtgtacaaccgaaatcatggcgatgttttacgcacacgctctcggtgggtacgacgagaatcttcatgcctttcctggaatatcatcgactgttgccaatgatgtcaggaaatattctgttgtgtcagtttataataacaagtatgacattgtaaaagacaaatatatgtggtgttacagtcaggtgaacaagagatatattggagcactgctgcctatgtttgagtgcaatgaatatctacaaattggaaatccgatccatgatcaagaaggaaatcaaatctctatcatcacatatcgccacaaaaactactatgctctaagcggaatcgggtacgagagtctagacttgtgtttggaaggagtagggattcatcatcacgtacttgaaacaggaaacgctgtatatggaaaagttcaacatgattattctactatcaaagagaaggccaaagaaatgagtgcacttagtccaggacctatcatcgattaccacgtctggataggagattgtatctgtcaagttactgctgtggacgtacatggaaaggaaattatgaaaatgagattcaaaaagggtgcggtgcttccgatcccaaatctggtaaaagttaaacttggggagaatgatacagaaaatctttcttctactatatcggcggcaccatcgaggtaaccacctctctggaagacagcgtgaatcatgtactcatgaaacgtttggaaactatacgccatatgtggtctgttgtatatgatcattttgatattgtgaatggtaaagaatgctgttatgtgcatacgcattcatctaatcaaaatcctataccgagtactgtaaaaacaaatttgtacatgaagactatgggatcatgcattcaaatggattccatggaagctctagagtatcttagcgaactgaaggaatcaggtggatggagtcccagaccagaaatgcaggaatttgaatatccagatggagtggaagacactgaatcaattgagagattggcagaggagttcttcaatagatcagaacttcaggctggtgaatcagtcaaatttggtaattctattaattgttaaacatacatctgtttcagctaagcaactaagaacacgtatacggcagcagcttccttctatactctcatcttttaccaacacaaagggtggatatttgttcattggagttgataataatacacacaaagtatttggattcacggtgggttacgactacctcagactgatagagaatgatatagaaaagcatatcaaaagacttcgtgttgtgcatttctgtgagaagaaagaggacatcaagtacgcgtgtcgattcatcaaggtatataaacctggggatgagactacctcgacatacgtgtgcgctatcaaagtggaaagatgctgttgtgctgtgtttgcagattggccagaatcatggtatatggatactaatggtatcaagaagtattctccagatgaatgggtgtcacatataaaattttaattaatgtaactatagagaacaaataataaggttgtaatatcatatagacaataactaacaattaattagtaactgttatctcttttttaactaaccaactaactatatacctattaatacatcgtaattatagttcttaacatctattaatcattaattcgcttctttaattttttataaactaacattgttaattgaaaagggataacatgttacagaatataaattatatatggatttttttaaaaaggaaatacttgactggagtatatatttatctcttcattatatagcacgcgtgttttccaatttttccacatcccatataatacaggattataatctcgttcgaacatacgagaaagtggataaaacaatagttgattttttatctaggttgccaaatttattccatattttagaatatggggaaaatattctacatatttattctatggatgatgctaatacgaatattataattttttttctagatagagtattaaatattaataagaacgggtcatttatacacaatctcgggttatcatcatccattaatataaaagaatatgtatatcaattagttaataatgatcatccagataataggataagactaatgcttgaaaatggacgtagaacaagacattttttgtcctatatatcagatacagttaatatctatatatgtattttaataaatcatggattttatatagatgccgaagacagttacggttgtacattattacatagatgtatatatcactataagaaatcagaatcagaatcatacaatgaattaattaagatattgttaaataatggatcagatgtagataaaaaagatacgtacggaaacacaccttttatcctattatgtaaacacgatatcaacaacgtggaattgtttgagatatgtttagagaatgctaatatagactctgtagactttaatagatatacacctcttcattatgtctcatgtcgtaataaatatgattttgtaaagttattaatttctaaaggagcaaatgttaatgcgcgtaataaattcggaactactccattttattgtggaattatacacggtatctcgcttataaaactatatttggaatcagacacagagttagaaatagataatgaacatatagttcgtcatttaataatttttgatgctgttgaatctttagattatctattatccagaggagttattgatattaactatcgtactatatacaacgaaacatctatttacgacgctgtcagttataatgcgtataatacgttggtctatctattaaacaaaaatggtgattttgagacgattactactagtggatgtacatgtatttcggaagcagtcgcaaacaacaacaaaataataatggaagtactattgtctaaacgaccatctttgaaaattatgatacagtctatgatagcaattactaaacataaacagcataatgcagatttattgaaaatgtgtataaaatatactgcgtgtatgaccgattatgatactcttatagatgtacagtcgctacagcaatataaatggtatattttaagatgtttcgatgaaatagatatcatgaagagatgttatataaaaaataaaactgtattccaattagttttttgtatcaaagacattaatactttaatgagatacggtaaacatccttctttcgtgaaatgcactagtctcgacgtatacggaagtcgtgtacgtaatatcatagcatctattagatatcgtcagagattaattagtctattatccaagaagctggatcctggagataaatggtcgtgttttcctaacgaaataaaatataaaatattggaaaactttaacgataacgaactatccacatatctaaaaatcttataaacattattaaaatataaaatctaagtaggataaaatcacactacatcattgtttccttttagtgctcgacagtgtatactatttttaacgctcataaataaaaatgaaaacgatttccgttgttacgttgttatgcgtactacctgctgttgtttattcaacatgtactgtacccactatgaataacgctaaattaacgtctaccgaaacatcgtttaatgataaccagaaagttacgtttacatgtgatcagggatatcattctttggatccaaatgctgtctgtgaaacagataaatggaaatacgaaaatccatgcaaaaaaatgtgcacagtttctgattatgtctctgaactatataataaaccgctatacgaagtgaattccaccatgacactaagttgcaacggcgaaacaaaatattttcgttgcgaagaaaaaaatggaaatacttcttggaatgatactgttacgtgtcctaatgcggaatgtcaacctcttcaattagaacacggatcgtgtcaaccagttaaagaaaaatactcatttggggaatatatgactatcaactgtgatgttggatatgaggttattggtgcttcgtacataagttgtacagctaattcttggaatgttattccatcatgtcaacaaaaatgtgatatgccgtctctatctaacggattaatttccggatctacattttctatcggtggcgttatacatcttagttgtaaaagtggttttacactaacggggtctccatcatccacatgtatcgacggtaaatggaatcccatactcccaatatgtgtacgaactaacgaaaaatttgatccagtggatgatggtcccgacgatgagacagatttgagcaaactctcgaaagacgttgtacaatatgaacaagaaatagaatcgttagaagcaacttatcatataatcatagtggcgttgacaattatgggcgtcatatttttaatctccgttatagtattagtttgttcctgtgacaaaaataatgaccaatataagttccataaattgctaccgtaaatataaatccgttaaaataattaataatttaataacaaacaagtatcaaaagattaaagacttatagctagaatcaattgagatgtcttcttcagtggatgttgatatctacgatgccgttagagcatttttactcaggcactattataacaagagatttattgtgtatggaagaagtaacgccatattacataatatatacaggctatttacaagatgcgccgttataccgttcgatgatatagtacgtactatgccaaatgaatcacgtgttaaacaatgggtgatggatacacttaatggtataatgatgaatgaacgcgatgtttctgtaagcgttggcaccggaatactattcatggaaatgtttttcgattacaataaaaatagtatcaacaatcaactaatgtatgatataattaatagcgtatctataattctagctaatgagagatatagaagcgcttttaacgacgatggtatatacatccgtagaaatatgattaacaagttgtacggatacgcatctctaactactattggcacgatcgctggaggtgtttgttattatctgttgatgcatctagttagtttgtataaataattatttcaatatactagttaaaattttaagattttaaatgtataaaaaactaataacgtttttatttgtaataggtgcattagcatcctattcgaataatgagtacactccgtttaataaactgagtgtaaaactctatatagatggagtagataatatagaaaattcatatactgatgataataatgaattggtgttaaattttaaagagtacacaatttctattattacagagtcatgcgacgtcggatttgattccatagatatagatgttataaacgactataaaattattgatatgtataccattgactcgtctactattcaacgcagaggtcacacgtgtagaatatctaccaaattatcatgccattatgataagtacccttatattcacaaatatgatggtgatgagcgacaatattctattactgcagagggaaaatgctataaaggaataaaatatgaaataagtatgatcaacgatgatactctattgagaaaacatactcttaaaattggatctacttatatatttgatcgtcatggacatagtaatacatattattcaaaatatgatttttaaaaatttaaaatatattatcacttcagtgacagtagtcaaataacaaacaacaccatgagatatattataattctcgcagttttgttcattaatagtatacatgctaaaataactagttataagtttgaatccgtcaattttgattccaaaattgaatggactggggatggtctatacaatatatcccttaaaaattatggcatcaagacgtggcaaacaatgtatacaaatgtaccagaaggaacatacgacatatccgcatttccaaagaatgatttcgtatctttctgggttaaatttgaacaaggcgattataaagtggaagagtattgtacgggactatgcgtcgaagtaaaaattggaccaccgactgtaacattgactgaatacgacgaccatatcaatttgtacatcgagcatccgtatgctactagaggtagcaaaaagattcctatttacaaacgcggtgacatgtgtgatatctacttgttgtatacggctaacttcacattcggagattctaaagaaccagtaccatatgatatcgatgactacgattgcacgtctacaggttgcagcatagactttgtcacaacagaaaaagtgtgcgtgacagcacagggagccacagaagggtttctcgaaaaaattactccatggagttcgaaagtatgtctgacacctaaaaagagtgtatatacatgcgcaattagatccaaagaagatgttcccaatttcaaggacaaaatggccagagttatcaagagaaaatttaatacacagtctcaatcttatttaactaaatttctcggtagcacatcaaatgatgttaccacttttcttagcatgcttaacttgactaaatattcataactaatttttattaatgatacaaaaacgaaataaaactgcatattatacactggttaacgcccttataggctctaaccattttcaagatgaggtccctgattatagtccttctgttcccctctatcatctactccatgtctattagacgatgtgagaagactgaagaggaaacatggggattgaaaatagggttgtgtataattgccaaagatttctatcccgaaagaactgattgcagtgttcatctcccaactgcaagtgaaggattgataactgaaggcaatggattcagggatatacgaaacaccgataaattataaaaaaagcaatgtgtccgctgtttccgttaataatactattttcgtaactggcggattattcataaataactctaatagcacgatcgtggttaacaatatggaaaaacttgacatttataaagacaaacaatggtcgattatagaaatgcctatggctagggtatatcacggcattgactcgacatttggaatgttatattttgccggaggtctatccgttaccgaacaatatggtaatttagagaaaaacaacgagatatcttgttacaatcctagaacgaataagtggtttgatatttcatatactatttataagatatccatatcatcattgtgtaaactaaataacgtcttctatgtatttagtaaggacattggatatgtggaaaagtatgatggtgcatggaagttagtacatgatcgtctccccgctataaaggcattatcaacttctccttattgattgaaaatgaaaatataaatagtttttatgtatagcagtattaccctatagttttattgcttactactaacatggatacagatgttacaaatgtagaagatatcataaatgaaatagatagagagaaagaagaaatactaaaaaatgtagaaattgaaaataataaaaacattaacaagaatcatcccaatgaatatattagagaagcactcgttattaataccagtagtaatagtgattccattgataaagaagttatagaatgtatcagtcacgatgtaggaatatagatcatatctactaatttttataatcgatacaaaacataaaaaacaactcgttattacatagcaggcatggaatccttcaagtattgttttgataacgatggcaagaaatggattatcggaaatactttatattctggtaattcaatactctataaggtcagaaaaaatttcactagttcgttctacaattacgtaatgaagatagatcacaaatcacacaagccattgttgtctgaaatacgattctatatatctgtattggatcctttgactatcgacaactggacacgggaacgtggtataaagtatttggctattccagatctgtatggaattggagaaaccgatgattatatgttcttcgttataaagaattcgggaagagtattcgccccaaaggatactgaatcagtcttcgaagcatgcgtcactatgataaacacgttagagtttatacactctcgaggatttacccatggaaaaatagaaccgaggaatatactgattagaaataaacgtctttcactaattgactattctagaactaacaaactatacaagagtggaaactcacatatagattacaacgaggacatgataacttcaggaaatatcaattatatgtgtgtagacaatcatcttggagcaacagtttcaagacgaggagatttagaaatgttgggatattgcatgatagaatggttcggtggcaaacttccatggaaaaacgaaagtagtataaaagtaataaaacaaaaaaaagaatataaaaaatttatagctactttctttgaggactgttttcctgaaggaaatgaacctctggaattagttagatatatagaattagtatacacgttagattattctcaaactcctaattatgacagactacgtaaactgtttatacaagattgaaattatattcttttttttatagagtgtggtagtgttacggatatctaatattaatattagactatctctatcgcgctacacgaccaatatcgattactatggatatcttctatgaaaggagagaatgtatttatttctccagcgtcaatctcgtcagtattgacaatactgtattatggagctaatggatccactgctgaacagctatcaaaatatgtagaaacggaggagaacacggataaggttagcgctcagaatatctcattcaaatccatgaataaagtatatgggcgatattctgccgtgtttaaagattcctttttgagaaaaattggcgataagtttcaaactgttgacttcactgattgtcgcactatagatgcaatcaacaagtgtgtagatatctttactgaggggaaaatcaatccactattggatgaaccattgtctcctagcaattagtgccgtatactttaaagcaaaatggttgacgccattcgaaaaggaatttaccagtgattatcccttttacgtatctccgacggaaatggtagacgtaagtatgatgtctatgtacggcaaggcatttaatcacgcatctgtaaaagaatcattcggcaacttttcaatcatagaactgccatatgttggagatactagtatgatggtcattcttccagacaagattgatggattagaatccatagaacaaaatctaacagatacaaattttaagaaatggtgtgactttatggatgctatgtttatagatgttcacattcccaagtttaaggtaacaggctcgtataatctggtggatactctagtaaagtcaggactgacagaggtgttcggttcaactggagattatagcaatatgtgtaatttagatgtgagtgtcgacgctatgatccacaaaacgtatatagatgtcaatgaagagtatacagaagcagctgcagcaacttctgtactagtggcagactgtgcatcaacaattacaaatgagttctgtgcagatcatccgttcatctatgtgattaggcatgttgatggaaaaattcttttcgttggtagatattgctctccgacaactaattgttaaccattttttttaaaaaaaatagaaaaaacatgtggtattagtgcaggtcgttgttcttccaattgcaattggtaagatgacggccaactttagtacccacgtcttttcaccacagcactgtggatgtgacagactgaccagtattgatgacgtcaaacaatgtttgactgaatatatttattggtcgtcctatgcataccgcaacaggcaatgcgctggacaattgtattccacactcctctcttttagagatgatgcggaattagtgttcatcgacattcgcgagctggtaaaaaatatgccgtgggatgatgtcaaagattgtacagaaatcatccgttgttatataccggatgagcaaaaaaccatcagagagatttcggccatcatcggactttgtgcatatgctgctacttactggggaggtgaagaccatcccactagtaacagtctgaacgcattgtttgtgatgcttgagatgctaaattacgtggattataacatcatattccggcgtatgaattgatgagttgtacatcttgacattttctttcttctcttctccctttcttctcttctcccttcctccctcttctccctttcccagaaacaaacttttttacccactataaaataaaatgagtatactacctattatatttcttcctatatttttttattcttcattcgttcagacttttaacgcgtctgaatgtatcgacaaagggcaatattttgcatcattcatggagttagaaaacgagccagtaatcttaccatgtcctcaaataaatacgctatcatccggatataatatattagatattttatgggaaaaacgaggagcggataatgatagaattataccgatagataatggtagcaatatgctaattctgaacccgacacaatcagactctggtatttatatatgcattaccacgaacgaaacctactgtgacatgatgtcgttaaatttgacaatcgtgtctgtctcagaatcaaatatagatcttatctcgtatccacaaatagtaaatgagagatctactggcgaaatggtatgtcccaatattaatgcatttattgctagtaacgtaaacgcagatattatatggagcggacatcgacgccttagaaataagagacttaaacaacggacacctggaattattaccatagaagatgttagaaaaaatgatgctggttattatacatgtgttttagaatatatatacggtggcaaaacatataacgtaaccagaattgtaaaattagaggtacgggatagaataataccttctactatgcaattaccagatggcattgtaacttcaataggtagtaatttgactattgcatgcagagtatcgttgagacctcccacaacggacaccgacgtcttttggataagtaatggtatgtattacgaagaagatgatggggacggaaacggtagaataagtgtagcaaataaaatctatatgaccgataagagacgtgttattacatcccggttaaacattaatcctgtcaaggaagaagatgctacaacgtttacgtgtatggcgtttactattcctagcatcagcaaaacagttactgttagtataacgtgaatgtatgttgttacatttccatgtcaattgagtttataagaatttttatacattatcttccaacaaacaattgacgaacgtattgctatgattaactcccacgatactatgcatattattaatcattaacttgcagactatacctagtgctattttgacatactcgtgttcttgtgtaattgcggtatctatattattaaagtacgtaaatctagctatagttttattatttaattttagataatataccgtctccttatttttaaaaattgccacatcctttattaaatcatgaatgggaatttctatgtcatcgttagtatattgtgaacaacaagagcagatatctataggaaagggtggaatgcgatacattgatctatgtagttttaaaacacacgcgaactttgaagaatttatataaatcattccatcgatacatccttctatgttgacatgtatatatccaggaattcttttattaatgtcaggaaatgtataaactaaaacattgcccgaaagcggtgcctctatctgcgttatatccgttcttaacttacaaaatgtaaccaatacctttgcatgacttgttttgttcggcaacgttagtttaaacttgacgaatggattaattacaatagcatgatccgcgcatctattaagtttttttactttaacgcccttgtatgtttttacagagactttatctaaatttctagtgcttgtatgtgttataaatataacgggatatagaaccgaatcacctaccttagatacccaattacattttatcagatccagataataaacaaattttgtcgccctaactaattctatattgttatatattttacaattggttatgatatcatgtaataacttggagtctaacgcgcatcgtcgtacgtttatacaattgtgatttagtgtagtatatctacacatgtatttttccgcactatagtattctggactagtgataaaactatcgttatatctgtcttcaatgaactcatcgagatattgctctctgtcatattcatacacctgcataaactttctagacatcttacaatccgtgttattttaggatcatatttacatatttacgggtatatcaaagatgttagattagttaatgggaatcgtctataataatgaatattaaacaattatatgaggacttttaccacaaagcatcataaaaatgagtcgtcgtctgatttatgttttaaatatcaaccgcaaatcaactcataaaatacaagagaatgaaatatatacatattttagtcattgcaatatagaccatacttctacagaacttgattttgtagttaaaaactatgatctaaacagacgacaacctgtaactgggtatactgcactacactgctatttgtataataattactttacaaacgatgtactgaagatattattaaatcatgacgtaaatgtaacgatgaaaaccagtagcggacgtatgcctgtttatatattgcttactagatgttgtaatatttcacatgatgtagtgatagatatgatagacaaagataaaaaccacttattacatagagactattccaacctattactagagtatataaaatctcgttacatgttattgaaggaagaggatatcgatgagaacatagtatccactttattagataagggaatcgatcctaactttaaacaagacggatatacagcgttacattattattatttgtgtctcgcacacgtttataaactaggtgagtgtagaaaaccgataacgataaaaaaggccaagcgaattatttctttgtttatacaacatggagctaatctaaacgcgttagataattgtggtaatacaccattccatttgtatcttagtattgaaatgtgtaataatattcatatgactaaaatgctgttgacttttaatccgaatttcaaaatatgtaataatcatggattaacgcctatactatgttatataacttccgactacatacaacacgatattcttgttatgttaatacatcactatgaaacaaatgttggagaaatgccgatagatgagcgtcgtatgatcgtattcgagtttatcaaaacatattctacacgtccggcagattcgataacttatttgatgaataggtttaaaaatataaatatttatacccgctatgaaggaaagacattattacacgtagcatgtgaatataataatacacaagtaatagattatcttatacgtatcaacggagatataaatgcgttaaccgacaataacaaacacgctacacaactcattatagataacaaagaaaattccccatataccattaattgtttactgtatatacttagatatattgtagataagaatgtgataagatcgttggtggatcaacttccatctctacctatcttcgatataaaatcatttgagaaattcatatcctactgtatacttttagatgacacattttacgataggcacgttaagaatcgcgattctaaaacgtatcgatacgcattttcaaaatacatgtcgtttgataaatacgatggtataataactaaatgtcacgacgaaacaatgttactcaaactgtccactgttctagacactacactatatgcagttttaagatgtcataattcgagaaagttaagaagatacctcaacgagttaaaaaaatataataacgataagtcctttaaaatatattctaatattatgaatgagagataccttaatgtatattataaagatatgtacgtgtcaaaggtatatgataaactatttcctgttttcacagataaaaattgtctactaacattactaccttcagaaattatatacgaaatattatacatgctgacaattaacgatctttataatatatcgtatccacctaccaaagtatagttgtatttttctcatgcgatgtgtgtaaaaaaactgatattatataaatattttagtgccgtataataaagatgacgatgaaaatgatggtacatatatatttcgtatcattattgttattgctattccacagttacgccatagacatcgaaaatgaaatcacagaattcttcaataaaatgagagatactctaccagctaaagactctaaatggttgaatccagcatgtatgttcggaggcacaatgaatgatatagccgctctaggagagccattcagcgcaaagtgtcctcctattgaagacagtcttttatcgcacagatataaagactatgtggttaaatgggagaggctagaaaagaatagacggcgacaggtttctaataaacgtgttaaacatggtgatttatggatagccaactatacatctaaattcagtaaccgtaggtatttgtgcaccgtaactacaaagaatggtgactgtgttcagggtatagttagatctcatattaaaaaacctccttcatgcattccaaaaacatatgaactaggtactcatgataagtatggcatagacttatactgtggaattctttacgcaaaacattataataatataacttggtataaagataataaggaaattaatatcgacgacattaagtattcacaaacgggaaaggaattaattattcataatccagagttagaagatagcggaagatacgactgttacgttcattacgacgacgttagaatcaagaatgatatcgtagtatcaagatgtaaaatacttacggttataccgtcacaagaccacaggtttaaactaatactagatccgaaaatcaacgtaacgataggagaacctgccaatataacatgcactgctgtgtcaacgtcattattgatcgacgatgtactgattgaatgggaaaatccatccggatggcttataggattcgattttgatgtatactctgttttaactagtagaggcggtatcaccgaggcgaccttgtactttgaaaatgttactgaagaatatataggtaatacatataaatgtcgtggacacaactattattttgaaaaaacccttacaactacagtagtattggagtaaatatacaatgcatttttatatacattactgaattattattactgaattattattactgaattattattaattatatcgtatttgtgctatagaatggatgaagatacgcgactatctaggtatttgtatctcaccgatagagaacatataaatgtagactctattaaacagttgtgtaaaatatcagatcctaatgcatgttatagatgtggatgtacggctttacatgagtacttttataattatagatcagtcaacggaaaatacaagtatagatacaacggttactatcaatattattcatctagcgattatgaaaattataatgaatattattatgatagaactggtatgaacagtgagagtgataatatatcaatcaaaacagaatatgaattctatgatgaaacacaagatcaaagtacacaactagtaggttacgacattaaactcaaaaccaatgaggatgattttatggctatgatagatcagtgggtgtccatgattatatagatgaatcaattaataaagtagtatatggaagagagtctcacgtaagatggcgggatatatggcaagaacataatgatggcgtatacagtataggaaaggagtgcatagataatatatacgaagacaaccataccgtagacgaattctacaagatagacagcgtatcagatgtagatgacgcggaacacatatctccgataactaaaaaaccatagaatcagttgatgataatacctacatttctaatcttccgtataccatcaaatacaaaatattcgagcaacaataagtattttttatacctttaaaactgataaataaattttttctagtgatattttggcaagatgagaatcctatttctcatcgctttcatgtatgggtgtgttcactcatatgttaacgcggttgaaaccaaatgtccaaatctagacattgtaacatcttctggagaatttcattgttcaggatgtgtggaacatatgcctgagtttagctatatgtattggttggcaaaggatatgaaatcggacgaggataccaagtttatagaacatctgggtgatggcatcaaagaagatgaaaccgttcgtaccacagatagtggaatcgtcactctacgtaaagtccttcatgtgactgatactaataaatttgataattataggttcacttgtgtcctcgctacgctagatggcatttataaaaagaatgtttgctgaagtagttgtgtgctactatttttatttatgatataatctaatggaattaatttgaattgatatttatccaatactaaagattatattagaatcaaattaatcttttatacgagaaaaaataacgacatacgtcgtcaacaaattaaactttttatttattagttaactagcttatagaacttgctcattgttatgtttctaaaacgggtacggcatataggacaattatccgacgcaccggtttctcttcgtgttctatgccatatattgatgcatgttatgcaaaatatatgagtacacgaatccaataaaccaaagtatctatcgttttgagtaaacaacttcatagcaaattccacattctttttctttacttactctatacacgtcctcgtatttatttagtattttgatgatatccaactcagaaatggttgttgtattattgggtgtatttggagtataggtattattagctatgtaccaatttaccaaccctcttaatattgattgataatcacatcggttatccaattaataactaaattgtagtgtatatatagaccatatatgtttctatttttttgacagttacgtatagtttcagtaagttttgattgttgtattcctgtatctctagataagttagtcatatagtcccttccggcgatacgttttttccaagcccgaaattgattagccaaatgtgtatttatttttgtgatattgatataatatttcggataatgcatactgttagtcttatatcatttggttcatctatgtattgtaatattgttacatgatctatagatgatgtattgattttggcaggatcgaattccatatccgcgactaaacagtgaaaaaaatgtaaatactttttaaattttaaattagtaaaacttttttttattttttatgattccaaaaatactgaatacaaagtcctaaattataaatatggagatcatactaccacaacttattattatgtatacaaggccggtgtaatagatagatatatataattctattacaccggcagacaattaccgaccggtatttgtcgttaccaacataccgtataatatgtaatatacaattccataacccattgacagttgttatacatcaaaattgcaattcttttgattacgatgttataagaatgtagttaattgatgtatgatgttaatgtgtcctctttcctcttataacatcgtaatcaaaaacttttttataatatatacctaataatgtgtcttaatagttctcgtgattcgtcaaacaatcattcttataaaatataataaagcaacgtaaaaacacataaaaataagcgtaactaataagacaatggatatttacgacgataaaggtctacagactattaaactgtttaataatgaatttgattgtataaggaatgacatcagagaattatttaaacatgtaactgattccgatagtatacaacttccgatggaagacaattctgatattatagaaaatatcagaaaaatactatatagacgattaaaaaatgtagaatgtgttgacatcgataacacaataacttttatgaaatacgatccaaatgatgataataagcgtacgtgttctaattgggtacccttaactaataactatatggaatattgtctagtaatatatttggaaacaccgatatgtggaggcaaaataaaattataccaccctacaggaaatataaagtcggataaggatattatgtttgcaaagactctagactttaaatcaacgaaagtgttaactggacgtaaaacaattgccgttctagacatatccgtttcatataatagatcaatgactactattcactacaacgacgacgttgatatagatatacatactgataaaaatggaaaagagttatgttattgttatataacaatagatgatcattacttggttgatgtggaaactataggagttatagtcaatagatctggaaaatgtctgttagtaaataaccatctaggtataggtatcgttaaagataaacgtataagcgatagttttggagatgtatgtatggatacaatatttgacttttctgaagcacgagagttattttcattaactaatgatgataacaggaatatagcatgggacactgataaactagacgatgatacagatatatggactcccgtcacagaagatgattacaaatttctttctagactagtattgtatgcaaaatctcaatcggatactgtatttgactattatgttcttactggtgatacggaaccacccactgtattcattttcaaggtaactagattttactttaatatgccgaaataaaaaatttttgtataatatctagaggtagaggtattgtttagataaatacaaataacatagatacatcgcatacttagcatttttataaatatacataagacatacactttatacatttttgtaaaaatactcataaaaaaatttataaaaattatggcacaaccatatcttgtataggtagtttagttcgtcgagtgaacctataaacagataatagacaacacataataatgcctactaatacaagcataataccgggagatgggatatatgacgttgtagtgtttgggttttctgaacgttgatagtctactaatactacatgctgacatctaatgcctgtataaccatgagagcatctacaatacataccgtcaatatctctagcgtggatacagtcaccgtgtaaacaatatccatctccctctggaccgcataatctgatagctggaatatctgttgtagcgtttgtaatttctggcaatgtcgtttcgatagcgttaccactatcggcgaatgatctgattatcatagcagcgaacaacaacatcagataatttatcaacatttttgatggattctgtgtttatgctgtttctcagtgtgtgtttatgacaagattgggaattttatattattaattcagtaatataaactaataatatattgttaattgtgtaaataatataaaaataacaatacaatattgaatgtgttgctgttaaaaatgtatgtgttaatataatagaataaaataaatgagtatgatcattttagataacgattgattttatcattaccgcttcattcttatattctttgcttacggaacctatatttagaaacatctactaacaattttttatgcttgcattattaatggtatgtaatatgattgattgtgtacgcaataccaatttgttaagtatgaatacggggtacaaacataaattgaaatttaacattatttatttatgatatatatcgttatcgttaggtctataccatggatatctttaaagaactaatcttaaaacaccctgatgaaaatgttttgatttctccagtttccattttatctactttatctattctaaatcatggagcagctggttctacagctgaacaactatcaaaatatatagagaatatgaatgagaatacacccgatgacaataatgatgacatggaggtagatattccgtattgtgcgacactagctaccgcaaataaaatatacggtagcgatagtatcgagttccacgcctccttcctacaaaaaataaaagacgattttcaaactgtaaactttaataatgctaaccaaacaaaggaactaatcaacgaatgggttaagacaatgacaaatggtaaaattaattccttattgactagtccgctatccattaatactcgtatgacagttgttagcgccgtccattttaaagcaatgtggaaatatccattttctaaacatcttacatatacagacaagttttatatttctaagaatatagttaccagcgttgatatgatggtgggtaccgagaataacttgcaatatgtacatattaatgaattattcggaggattctctattatcgatattccatacgagggaaactctagtatggtaattatactaccggacgacatagaaggtatatataacatagaaaaaaatataacagatgaaaaatttaaaaaatggtgtggtatgttatctactaaaagtatagacttgtatatgccaaagtttaaagtggaaatgacagaaccgtataatctggtaccgattttagaaaatttaggacttactaatatattcggatattatgcagattttagcaagatgtgtaatgaaactatcactgtagaaaaatttctacatacgacgtttatagatgttaatgaggagtatacagaagcatcggccgttacaggagtatttacgattaacttttcgatggtatatcgtacgaaggtctacataaaccatccattcatgtacatgattaaagacaccacaggacgtatactttttatagggaaatactgctatccgcaataaatataaacaaatagacttttataaagagtcttcaacgataagtatatcgacatactacttatgctgcgaaagattctgaacgagaacgactatctcaccctcttggatcatatccgcactgctaaatactaaatctccactacactttttatcatcttatgaggaatgattgccttcgtgaaataggaataattagcaccagaatagctatggattattgtggtagagagtgcactattctatgtcgtctactggatgaagatgtgacgtacaaaaaaataaaactagaaattgaaacgtgtcacaacttatcaaaacatatagatagacgaggaaacaatgcgctacattgttacgtctccaataaatgcgatacagacattaagattgttctctcgcggagtcgagagactttgtagaaacaacgaaggattaactccgctaggagtatacagtaagcatagatacgtaaaatctcagattgtgcatctactgatatccagctattcaaattcctctaacgaactcaagtcgaatataaatgatttcgatctgtattcggataatatcgacttacgtctgctaaaatacctaattgtggataaacggatacgtccgtccaagaatacgaattatgcaatcaatggtctcggattggtggatatatacgtaacgacgcctaatccgagaccagaagtattgctatggcttcttaaatcagaatgttacagcaccggttacgtatttcgtacctgtatgtacgacagtgatatgtgtaagaactctcttcattactatatatcgtctcatagagaatctcaatctctatccaaggatgtaattaaatgtttgatcgataacaatgtttccatccatggcagagacgaaggaggatctttacccatccaatactactggtctttctcaaccatagatatagagattgttaaattattattaataaaggatgtggacacgtgtagagtatacgacgtcagccctatattagaggcgtattatctaaacaagcgatttagagtaaccccatataatgtagacatggaaatcgttaatcttcttattgagagacgtcatactcttgtcgacgtaatgcgtagtattacttcgtacgattccagagaatataaccactacatcatcgataacattctaaagagatttagacaacaggatgaatccatcgtacaagccatactgataaactacttacattacggcgatatggtcgttcgatgcatgttagataacggacaacaactatcctctacacgactactttgttaataataatctcgtcgatgtaaacgtcgtaaggtttatcgtggaaaatatggacacgcggctgtaaatcacgtatcgaacaatggccgtctatgtatgtacggtctgatattatcgagatttaataattgcgggtatcactgttatgaaaccatactgatagatgtatttgatatactaagcaagtacatggatgatatagatatgatcgataactctactatattacgcggtcgatgtcaataatatacaatttgcaaagcggttattggaatatggagcgagtatcacgctcgataatcaatacggccatccagaaaagcagttacagaagagaaaacaaaacgaaatcgttgttctacaagatgtctctccctacgacgattactacgtaaaaaagatactagcctactgcctattaagggacgagtcattcgcggaactacatagtaaattctgtttaaacgaggactataaaagtgtatttatgaaaaatatatcattcgataagatagattccatcatcgtgacataagtcgcctcaaagagattcgaatctccgacaccgacctgtatacggtatcacagctatcttaaagccatacattcagacagtcacatttcatttcccatgtacgacgatctcatagaacagtgccatctatcgatggagcgtaaaagtaaactcgtcgacaaagcactcaataaattagagtctaccatcggtcaatctagactatcgtatttgcctccggaaattatgcgcaatatcatctaaacagtatgttgtacggaaagaaccattacaaatattatccatgatagaaagaaaatatctatatgattggagaagtaggaaacaggaacaagacaacgattactacattattaaatcatgaagtccgtattatactcgtatatattgtttctctcatgtataataataaacggaagagatatagcaccgcatgcaccatccgatggaaagtgtaaagacaacgaatacaaacgccataatttgtgtccgggaacatacgcttccagattatgcgatagcaagactaacacacgatgtacgccgtgtggttcgggtaccttcacatctcgcaataatcatttacccgcttgtctaagttgtaacggaagacgcgatcgtgtaacacgactcacaatagaatctgtgaatgctctcccggatattattgtcttctcaaaggatcatccggatgcaaggcatgtgtttcccaaacaaaatgtggaataggatacggagtatccggagacgtcatctgttctccgtgtggtctcggaacatattctcacaccgtctcttccgcagataaatgcgaacccgtacccagaaatacgtttaactatatcgatgtggaaattaacctgtatccagttaacgacacgtcgtgtactcggacgaccactaccggtctcagcgaatccatctcaacgtcggaactaactattactatgaatcataaagactgtaatcccgtatttcgtgatggatacttctccgttcttaataaggtagcgacttcaggtttctttacaggagaaaggtgtgcactctgaatttcgagattaaatgcaataacaaagattcttcctccaaacagttaacgaaagcaaagaatgatactatcatgccgcattcggagacagtaactctagtgggcgacatctatatactatatagtaataccaatactcaagactacgaaactgatacaatctcttatcatgtgggtaatgttctcgatgtcgatagccatatgcccggtagttgcgatatacataaactgatcactaattccaaacccacccactttttatagtaagtttttcacccataaataataaatacaataattaatttctcgtaaaagtagaaaatatattctaatttattgcacggtaaggaagtagaatcataaagaacagtactcaatcaatagcaattatgaaacaatatatcgtcctggcatgcatgtgcctggcggcagctgctatgcctgccagtcttcagcaatcatcctcatcctcctcctcgtgtacggaagaagaaaacaaacatcatatgggaatcgatgttattatcaaagtcacaaagcaagaccaaacaccgaccaatgataagatttgccaatccgtaacggaaattacagagtccgagtcagatccagatcccgaggtggaatcagaagatgattccacatcagtcgaggatgtagatcctcctaccacttattactccatcatcggtggaggtctgagaatgaactttggattcaccaaatgtcctcagattaaatccatctcagaatccgctgatggaaacacagtgaatgctagattgtccagcgtgtccccaggacaaggtaaggactctcccgcgatcactcatgaagaagctcttgctatgatcaaagactgtgaagtgtctatcgacatcagatgtagcgaagaagagaaagacagcgacatcaagacccatccagtactcgggtctaacatctctcataagaaagtgagttacgaagatatcatcggttcaacgatcgtcgatacaaaatgcgtcaagaatctagagtttagcgttcgtatcggagacatgtgcaaggaatcatctgaacttgaggtcaaggatggattcaagtatgtcgacggatcggcatctgaaggtgcaaccgatgatacttcactcatcgattcaacaaaactcaaagcgtgtgtctgaatcgataactctattcatctgaaattggatgagtagggttaatcgaacgattcaggcacaccacgaattaaaaaagtgtaccggacactatattccggtttgcaaaacaaaaatgttcttaactacattcacaaaaagttacctctcgcgacttcttctttttctgtctcaatagtgtgatacgattatgacactattcctattcctattcctatttcctttcagagtatcacaaaaatattaaacctctttctgatggtctcataaaaaaagttttacaaaaatatttttattctctttctctctttgatggtctcataaaaaaagttttacaaaaatatttttattctctttctctctttgatggtctcataaaaaaagttttacaaaaatatttttattctctttctctctttgatggtctcataaaaaaagttttacaaaaatatttttattctctttctctctttgatggtctcataaaaaaagttttacaaaaatatttttattctctttctctctttgatggtctcataaaaaaagttttacaaaaatatttttattctctttctctctttgatggtctcataaaaaaagttttacaaaaatatttttattctctttctctctttgatggtctcataaaaaaagttttacaaaaatatttttattctctttctctctttgatggtctcataaaaaaagttttacaaaaatatttttattctctttctctctttgatggtctcataaaaaaagttttacaaaaatatttttattctctttctctctttgatggtctcataaaaaaagttttacaaaaatatttttattctctttctctctttgatggtctcataaaaaaagttttacaaaaatatttttattctctttctctctttgatggtctcataaaaaagttttacaaaaatatttttattctctttctctctttgatggtctcataaaaaagttttacaaaaatatttttattctctttctctctttgatggtctcataaaaaaagttttacaaaaatatttttattctctttctctctttgatggtctcataa

SEQ ID NO: 8 - DNA, 32 bp, Artificial Sequence
  FUKW-5 primer
gtcgaccaccatggtgggtgaggatagcgtgc

SEQ ID NO: 9 - DNA, 28 bp, Artificial Sequence
  FUKW-3 primer
ttaattaatcagctgtgccccagtttgc

SEQ ID NO: 10 - DNA, 5767 bp, Artificial Sequence
  HA-SE-hNET1
gacgtctaagaaaccattattatcatgacattaacctataaaaataggcgtatcacgaggccctttcgtctcgcgcgtttcggtgatgacggtgaaaacctctgacacatgcagctcccggagacggtcacagcttgtctgtaagcggatgccgggagcagacaagcccgtcagggcgcgtcagcgggtgttggcgggtgtcggggctggcttaactatgcggcatcagagcagattgtactgagagtgcaccatatgacacgattaccaatacttttgttactaatatcattagtatacgctacaccttttcctcagacatctaaaaaaataggtgatgatgcaactctatcatgtaatcgaaataatacaaatgactacgttgttatgagtgcttggtataaggagcccaattccattattcttttagctgctaaaagcgacgtcttgtattttgataattataccaaggataaaatatcttacgactctccatacgatgatctagttacaactatcacaattaaatcattgactgctagagatgccggtacttatgtatgtgcattctttatgacatcgcctacaaatgacactgataaagtagattatgaagaatactccacagagttgattgtaaatacagatagtgaatcgactatagacataatactatctggatctacacattcaccggaaactagttctgagaaacctgattatatagataattctaattgctcgtcggtattcgaaatctaagctcaaaaattgaaaaactagcgtctttttttgctcgaagtcgacgccaccatgcttctggcgcggatgaacccgcaggtgcagcccgagaacaacggggcggacacgggtccagagcagccccttcgggcgcgcaaaactgcggagctgctggtggtgaaggagcgcaacggcgtccagtgcctgctggcgccccgcgacggcgacgcgcagccccgggagacctggggcaagaagatcgacttcctgctgtccgtagtcggcttcgcagtggacctggccaacgtgtggcgcttcccctacctctgctacaagaacggcggcggtgccttcttgatcccgtacacactgttccttatcatcgcggggatgcccctgttctacatggagctggctctgggacagtacaaccgggagggggctgccaccgtttggaaaatctgcccattcttcaaaggcgttggctatgctgtcatcctgatcgccctgtacgttggcttctactacaacgtcatcatcgcctggtcactctactacctcttctcctccttcaccctcaacctgccctggaccgactgtggccacacctggaacagccccaactgtaccgaccccaagctcctcaatggctccgtgcttggcaaccacaccaagtactccaagtacaagttcacgccggcagccgagttttatgagcgtggtgtcctgcaccttcacgagagcagcgggattcatgacatcggcctgccccagtggcagctcttgctctgtctgatggtcgtcgtcatcgtcttgtattttagcctctggaaaggggtgaagacatcaggaaaggtggtgtggatcacagccacgctgccttacttcgtgctgttcgtgctcctggtccatggcgtcacgctgcccggagcctccaatggcatcaatgcctacctgcacatcgacttctaccgcttgaaagaggccacggtatggattgatgccgcaactcagatatttttttccttgggggctggatttggagtattgattgcatttgccagttacaacaaatttgacaacaactgttacagggatgccctgctgaccagcagcatcaactgtatcaccagcttcgtctctgggttcgccatcttctccatccttggttacatggcccatgaacacaaggtcaacattgaggatgtggccacagaaggagctggcctagtgttcatcctgtatccagaggccatttctaccctgtctggatctacattctgggctgttgtgtttttcgtcatgctcctggcgctgggccttgacagctcaatgggaggcatggaggctgtcatcacgggcctggcagatgacttccaggtcctgaagcgacaccggaaactcttcacatttggcgtcaccttcagcactttccttctcgccctgttctgcataaccaagggtggaatttacgtcttgaccctcctggacacctttgctgcgggcacctccatcctttttgctgtcctcatggaagccatcggagtttcctggttttatggagtggacaggttcagcaacgacatccagcagatgatggggttcaggccgggtctatactggagactgtgctggaagttcgtcagtcctgccttcctcctgttcgtggttgtggtcagcatcatcaacttcaagccactcacctacgacgactacatcttcccgccctgggccaactgggtggggtggggcatcgccctgtcctccatggtcctggtgcccatctacgtcatctataagttcctcagcacgcagggctctctttgggagagactggcctatggcatcacgccagagaacgagcaccacctggtggctcagagggacatcagacagttccagttgcaacactggctggccatctgagatgggtaattaattaatttttatcgatctaattcaacaatgtctggagagcttcgcaggatcccgactccggaaccaattactgataaagaagaagatcatacagttacagacactgtctcatacactacagtaagtacatcatctggaattgtcactactaaatcaaccaccgatgatacgtacaatgataatgatacagtaccaccaactactgtaggcggtagtacaacctctattagcaattataaaaccaaggactttgtagaaatatttggtattaccgcattaattatattgtcggccgtggcaatattctgtattacgtattatatatgtaataaacgttcacgtaaatacaaaacagagaacaaagtctagatttttgacttacataaatgtctgggatagtaaaatctatcagaattctagaaaagtagaaaatatattctaatttattgcacgggatgagcgaaaaatacatcgtcacctgggacatgttgcagatccatgcacgtaaactcgcaagccgactgatgccttctgaacaatggaaaggcattattgccgtaagccgtggcggtctggtaccgggtgcgttactggcgcgtgaactgggtattcgtcatgtcgataccgtttgtatttccagctacgatcacgacaaccagcgcgagcttaaagtgctgaaacgcgcagaaggcgatggcgaaggcttcatcgttattgatgacctggtggataccggtggtactgcggttgcgattcgtgaaatgtatccaaaagcgcactttgtcaccatcttcgcaaaaccggctggtcgtccgctggttgatgactatgttgttgatatcccgcaagatacctggattgaacagccgtgggatatgggcgtcgtattcgtcccgccaatctccggtcgctaaggatcagcttggcgtaatcatggtcatagctgtttcctgtgtgaaattgttatccgctcacaattccacacaacatacgagccggaagcataaagtgtaaagcctggggtgcctaatgagtgagctaactcacattaattgcgttgcgctcactgcccgctttccagtcgggaaacctgtcgtgccagctgcattaatgaatcggccaacgcgcggggagaggcggtttgcgtattgggcgctcttccgcttcctcgctcactgactcgctgcgctcggtcgttcggctgcggcgagcggtatcagctcactcaaaggcggtaatacggttatccacagaatcaggggataacgcaggaaagaacatgtgagcaaaaggccagcaaaaggccaggaaccgtaaaaaggccgcgttgctggcgtttttccataggctccgcccccctgacgagcatcacaaaaatcgacgctcaagtcagaggtggcgaaacccgacaggactataaagataccaggcgtttccccctggaagctccctcgtgcgctctcctgttccgaccctgccgcttaccggatacctgtccgcctttctcccttcgggaagcgtggcgctttctcatagctcacgctgtaggtatctcagttcggtgtaggtcgttcgctccaagctgggctgtgtgcacgaaccccccgttcagcccgaccgctgcgccttatccggtaactatcgtcttgagtccaacccggtaagacacgacttatcgccactggcagcagccactggtaacaggattagcagagcgaggtatgtaggcggtgctacagagttcttgaagtggtggcctaactacggctacactagaaggacagtatttggtatctgcgctctgctgaagccagttaccttcggaaaaagagttggtagctcttgatccggcaaacaaaccaccgctggtagcggtggtttttttgtttgcaagcagcagattacgcgcagaaaaaaaggatctcaagaagatcctttgatcttttctacggggtctgacgctcagtggaacgaaaactcacgttaagggattttggtcatgagattatcaaaaaggatcttcacctagatccttttaaattaaaaatgaagttttaaatcaatctaaagtatatatgagtaaacttggtctgacagttaccaatgcttaatcagtgaggcacctatctcagcgatctgtctatttcgttcatccatagttgcctgactccccgtcgtgtagataactacgatacgggagggcttaccatctggccccagtgctgcaatgataccgcgagacccacgctcaccggctccagatttatcagcaataaaccagccagccggaagggccgagcgcagaagtggtcctgcaactttatccgcctccatccagtctattaattgttgccgggaagctagagtaagtagttcgccagttaatagtttgcgcaacgttgttgccattgctacaggcatcgtggtgtcacgctcgtcgtttggtatggcttcattcagctccggttcccaacgatcaaggcgagttacatgatcccccatgttgtgcaaaaaagcggttagctccttcggtcctccgatcgttgtcagaagtaagttggccgcagtgttatcactcatggttatggcagcactgcataattctcttactgtcatgccatccgtaagatgcttttctgtgactggtgagtactcaaccaagtcattctgagaatagtgtatgcggcgaccgagttgctcttgcccggcgtcaatacgggataataccgcgccacatagcagaactttaaaagtgctcatcattggaaaacgttcttcggggcgaaaactctcaaggatcttaccgctgttgagatccagttcgatgtaacccactcgtgcacccaactgatcttcagcatcttttactttcaccagcgtttctgggtgagcaaaaacaggaaggcaaaatgccgcaaaaaagggaataagggcgacacggaaatgttgaatactcatactcttcctttttcaatattattgaagcatttatcagggttattgtctcatgagcggatacatatttgaatgtatttagaaaaataaacaaataggggttccgcgcacatttccccgaaaagtgccacct

SEQ ID NO: 11 - DNA, 5792 bp, Artificial Sequence
  HA-SEL-hNET2
gacgtctaagaaaccattattatcatgacattaacctataaaaataggcgtatcacgaggccctttcgtctcgcgcgtttcggtgatgacggtgaaaacctctgacacatgcagctcccggagacggtcacagcttgtctgtaagcggatgccgggagcagacaagcccgtcagggcgcgtcagcgggtgttggcgggtgtcggggctggcttaactatgcggcatcagagcagattgtactgagagtgcaccatatgacacgattaccaatacttttgttactaatatcattagtatacgctacaccttttcctcagacatctaaaaaaataggtgatgatgcaactctatcatgtaatcgaaataatacaaatgactacgttgttatgagtgcttggtataaggagcccaattccattattcttttagctgctaaaagcgacgtcttgtattttgataattataccaaggataaaatatcttacgactctccatacgatgatctagttacaactatcacaattaaatcattgactgctagagatgccggtacttatgtatgtgcattctttatgacatcgcctacaaatgacactgataaagtagattatgaagaatactccacagagttgattgtaaatacagatagtgaatcgactatagacataatactatctggatctacacattcaccggaaactagttctgagaaacctgattatatagataattctaattgctcgtcggtattcgaaatctaagcttaaaaattgaaattttattttttttttttggaatataaataagctcgaagtcgacgccaccatgcttctggcgcggatgaacccgcaggtgcagcccgagaacaacggggcggacacgggtccagagcagccccttcgggcgcgcaaaactgcggagctgctggtggtgaaggagcgcaacggcgtccagtgcctgctggcgccccgcgacggcgacgcgcagccccgggagacctggggcaagaagatcgacttcctgctgtccgtagtcggcttcgcagtggacctggccaacgtgtggcgcttcccctacctctgctacaagaacggcggcggtgccttcttgatcccgtacacactgttccttatcatcgcggggatgcccctgttctacatggagctggctctgggacagtacaaccgggagggggctgccaccgtttggaaaatctgcccattcttcaaaggcgttggctatgctgtcatcctgatcgccctgtacgttggcttctactacaacgtcatcatcgcctggtcactctactacctcttctcctccttcaccctcaacctgccctggaccgactgtggccacacctggaacagccccaactgtaccgaccccaagctcctcaatggctccgtgcttggcaaccacaccaagtactccaagtacaagttcacgccggcagccgagttttatgagcgtggtgtcctgcaccttcacgagagcagcgggattcatgacatcggcctgccccagtggcagctcttgctctgtctgatggtcgtcgtcatcgtcttgtattttagcctctggaaaggggtgaagacatcaggaaaggtggtgtggatcacagccacgctgccttacttcgtgctgttcgtgctcctggtccatggcgtcacgctgcccggagcctccaatggcatcaatgcctacctgcacatcgacttctaccgcttgaaagaggccacggtatggattgatgccgcaactcagatatttttttccttgggggctggatttggagtattgattgcatttgccagttacaacaaatttgacaacaactgttacagggatgccctgctgaccagcagcatcaactgtatcaccagcttcgtctctgggttcgccatcttctccatccttggttacatggcccatgaacacaaggtcaacattgaggatgtggccacagaaggagctggcctagtgttcatcctgtatccagaggccatttctaccctgtctggatctacattctgggctgttgtgtttttcgtcatgctcctggcgctgggccttgacagctcaatgggaggcatggaggctgtcatcacgggcctggcagatgacttccaggtcctgaagcgacaccggaaactcttcacatttggcgtcaccttcagcactttccttctcgccctgttctgcataaccaagggtggaatttacgtcttgaccctcctggacacctttgctgcgggcacctccatcctttttgctgtcctcatggaagccatcggagtttcctggttttatggagtggacaggttcagcaacgacatccagcagatgatggggttcaggccgggtctatactggagactgtgctggaagttcgtcagtcctgccttcctcctgttcgtggttgtggtcagcatcatcaacttcaagccactcacctacgacgactacatcttcccgccctgggccaactgggtggggtggggcatcgccctgtcctccatggtcctggtgcccatctacgtcatctataagttcctcagcacgcagggctctctttgggagagactggcctatggcatcacgccagagaacgagcaccacctggtggctcagagggacatcagacagttccagttgcaacactggctggccatctgagatgggtaattaattaatttttatcgatctaattcaacaatgtctggagagctcggtaccaagcttcgcaggatcccgactccggaaccaattactgataaagaagaagatcatacagttacagacactgtctcatacactacagtaagtacatcatctggaattgtcactactaaatcaaccaccgatgatacgtacaatgataatgatacagtaccaccaactactgtaggcggtagtacaacctctattagcaattataaaaccaaggactttgtagaaatatttggtattaccgcattaattatattgtcggccgtggcaatattctgtattacgtattatatatgtaataaacgttcacgtaaatacaaaacagagaacaaagtctagatttttgacttacataaatgtctgggatagtaaaatctatcagaattctagaaaagtagaaaatatattctaatttattgcacgggatgagcgaaaaatacatcgtcacctgggacatgttgcagatccatgcacgtaaactcgcaagccgactgatgccttctgaacaatggaaaggcattattgccgtaagccgtggcggtctggtaccgggtgcgttactggcgcgtgaactgggtattcgtcatgtcgataccgtttgtatttccagctacgatcacgacaaccagcgcgagcttaaagtgctgaaacgcgcagaaggcgatggcgaaggcttcatcgttattgatgacctggtggataccggtggtactgcggttgcgattcgtgaaatgtatccaaaagcgcactttgtcaccatcttcgcaaaaccggctggtcgtccgctggttgatgactatgttgttgatatcccgcaagatacctggattgaacagccgtgggatatgggcgtcgtattcgtcccgccaatctccggtcgctaaggatcagcttggcgtaatcatggtcatagctgtttcctgtgtgaaattgttatccgctcacaattccacacaacatacgagccggaagcataaagtgtaaagcctggggtgcctaatgagtgagctaactcacattaattgcgttgcgctcactgcccgctttccagtcgggaaacctgtcgtgccagctgcattaatgaatcggccaacgcgcggggagaggcggtttgcgtattgggcgctcttccgcttcctcgctcactgactcgctgcgctcggtcgttcggctgcggcgagcggtatcagctcactcaaaggcggtaatacggttatccacagaatcaggggataacgcaggaaagaacatgtgagcaaaaggccagcaaaaggccaggaaccgtaaaaaggccgcgttgctggcgtttttccataggctccgcccccctgacgagcatcacaaaaatcgacgctcaagtcagaggtggcgaaacccgacaggactataaagataccaggcgtttccccctggaagctccctcgtgcgctctcctgttccgaccctgccgcttaccggatacctgtccgcctttctcccttcgggaagcgtggcgctttctcatagctcacgctgtaggtatctcagttcggtgtaggtcgttcgctccaagctgggctgtgtgcacgaaccccccgttcagcccgaccgctgcgccttatccggtaactatcgtcttgagtccaacccggtaagacacgacttatcgccactggcagcagccactggtaacaggattagcagagcgaggtatgtaggcggtgctacagagttcttgaagtggtggcctaactacggctacactagaaggacagtatttggtatctgcgctctgctgaagccagttaccttcggaaaaagagttggtagctcttgatccggcaaacaaaccaccgctggtagcggtggtttttttgtttgcaagcagcagattacgcgcagaaaaaaaggatctcaagaagatcctttgatcttttctacggggtctgacgctcagtggaacgaaaactcacgttaagggattttggtcatgagattatcaaaaaggatcttcacctagatccttttaaattaaaaatgaagttttaaatcaatctaaagtatatatgagtaaacttggtctgacagttaccaatgcttaatcagtgaggcacctatctcagcgatctgtctatttcgttcatccatagttgcctgactccccgtcgtgtagataactacgatacgggagggcttaccatctggccccagtgctgcaatgataccgcgagacccacgctcaccggctccagatttatcagcaataaaccagccagccggaagggccgagcgcagaagtggtcctgcaactttatccgcctccatccagtctattaattgttgccgggaagctagagtaagtagttcgccagttaatagtttgcgcaacgttgttgccattgctacaggcatcgtggtgtcacgctcgtcgtttggtatggcttcattcagctccggttcccaacgatcaaggcgagttacatgatcccccatgttgtgcaaaaaagcggttagctccttcggtcctccgatcgttgtcagaagtaagttggccgcagtgttatcactcatggttatggcagcactgcataattctcttactgtcatgccatccgtaagatgcttttctgtgactggtgagtactcaaccaagtcattctgagaatagtgtatgcggcgaccgagttgctcttgcccggcgtcaatacgggataataccgcgccacatagcagaactttaaaagtgctcatcattggaaaacgttcttcggggcgaaaactctcaaggatcttaccgctgttgagatccagttcgatgtaacccactcgtgcacccaactgatcttcagcatcttttactttcaccagcgtttctgggtgagcaaaaacaggaaggcaaaatgccgcaaaaaagggaataagggcgacacggaaatgttgaatactcatactcttcctttttcaatattattgaagcatttatcagggttattgtctcatgagcggatacatatttgaatgtatttagaaaaataaacaaataggggttccgcgcacatttccccgaaaagtgccacct

SEQ ID NO: 12 - DNA, 5765 bp, Artificial Sequence
  HA-SL-hNET1
gacgtctaagaaaccattattatcatgacattaacctataaaaataggcgtatcacgaggccctttcgtctcgcgcgtttcggtgatgacggtgaaaacctctgacacatgcagctcccggagacggtcacagcttgtctgtaagcggatgccgggagcagacaagcccgtcagggcgcgtcagcgggtgttggcgggtgtcggggctggcttaactatgcggcatcagagcagattgtactgagagtgcaccatatgacacgattaccaatacttttgttactaatatcattagtatacgctacaccttttcctcagacatctaaaaaaataggtgatgatgcaactctatcatgtaatcgaaataatacaaatgactacgttgttatgagtgcttggtataaggagcccaattccattattcttttagctgctaaaagcgacgtcttgtattttgataattataccaaggataaaatatcttacgactctccatacgatgatctagttacaactatcacaattaaatcattgactgctagagatgccggtacttatgtatgtgcattctttatgacatcgcctacaaatgacactgataaagtagattatgaagaatactccacagagttgattgtaaatacagatagtgaatcgactatagacataatactatctggatctacacattcaccggaaactagttctgagaaacctgattatatagataattctaattgctcgtcggtattcgaaatctaagctcttttttttttttttttttttggcatataaataagtcgacgccaccatgcttctggcgcggatgaacccgcaggtgcagcccgagaacaacggggcggacacgggtccagagcagccccttcgggcgcgcaaaactgcggagctgctggtggtgaaggagcgcaacggcgtccagtgcctgctggcgccccgcgacggcgacgcgcagccccgggagacctggggcaagaagatcgacttcctgctgtccgtagtcggcttcgcagtggacctggccaacgtgtggcgcttcccctacctctgctacaagaacggcggcggtgccttcttgatcccgtacacactgttccttatcatcgcggggatgcccctgttctacatggagctggctctgggacagtacaaccgggagggggctgccaccgtttggaaaatctgcccattcttcaaaggcgttggctatgctgtcatcctgatcgccctgtacgttggcttctactacaacgtcatcatcgcctggtcactctactacctcttctcctccttcaccctcaacctgccctggaccgactgtggccacacctggaacagccccaactgtaccgaccccaagctcctcaatggctccgtgcttggcaaccacaccaagtactccaagtacaagttcacgccggcagccgagttttatgagcgtggtgtcctgcaccttcacgagagcagcgggattcatgacatcggcctgccccagtggcagctcttgctctgtctgatggtcgtcgtcatcgtcttgtattttagcctctggaaaggggtgaagacatcaggaaaggtggtgtggatcacagccacgctgccttacttcgtgctgttcgtgctcctggtccatggcgtcacgctgcccggagcctccaatggcatcaatgcctacctgcacatcgacttctaccgcttgaaagaggccacggtatggattgatgccgcaactcagatatttttttccttgggggctggatttggagtattgattgcatttgccagttacaacaaatttgacaacaactgttacagggatgccctgctgaccagcagcatcaactgtatcaccagcttcgtctctgggttcgccatcttctccatccttggttacatggcccatgaacacaaggtcaacattgaggatgtggccacagaaggagctggcctagtgttcatcctgtatccagaggccatttctaccctgtctggatctacattctgggctgttgtgtttttcgtcatgctcctggcgctgggccttgacagctcaatgggaggcatggaggctgtcatcacgggcctggcagatgacttccaggtcctgaagcgacaccggaaactcttcacatttggcgtcaccttcagcactttccttctcgccctgttctgcataaccaagggtggaatttacgtcttgaccctcctggacacctttgctgcgggcacctccatcctttttgctgtcctcatggaagccatcggagtttcctggttttatggagtggacaggttcagcaacgacatccagcagatgatggggttcaggccgggtctatactggagactgtgctggaagttcgtcagtcctgccttcctcctgttcgtggttgtggtcagcatcatcaacttcaagccactcacctacgacgactacatcttcccgccctgggccaactgggtggggtggggcatcgccctgtcctccatggtcctggtgcccatctacgtcatctataagttcctcagcacgcagggctctctttgggagagactggcctatggcatcacgccagagaacgagcaccacctggtggctcagagggacatcagacagttccagttgcaacactggctggccatctgagatgggtaattaattaatttttatcgatctaattcaacaatgtctggagagcttcgcaggatcccgactccggaaccaattactgataaagaagaagatcatacagttacagacactgtctcatacactacagtaagtacatcatctggaattgtcactactaaatcaaccaccgatgatacgtacaatgataatgatacagtaccaccaactactgtaggcggtagtacaacctctattagcaattataaaaccaaggactttgtagaaatatttggtattaccgcattaattatattgtcggccgtggcaatattctgtattacgtattatatatgtaataaacgttcacgtaaatacaaaacagagaacaaagtctagatttttgacttacataaatgtctgggatagtaaaatctatcagaattctagaaaagtagaaaatatattctaatttattgcacgggatgagcgaaaaatacatcgtcacctgggacatgttgcagatccatgcacgtaaactcgcaagccgactgatgccttctgaacaatggaaaggcattattgccgtaagccgtggcggtctggtaccgggtgcgttactggcgcgtgaactgggtattcgtcatgtcgataccgtttgtatttccagctacgatcacgacaaccagcgcgagcttaaagtgctgaaacgcgcagaaggcgatggcgaaggcttcatcgttattgatgacctggtggataccggtggtactgcggttgcgattcgtgaaatgtatccaaaagcgcactttgtcaccatcttcgcaaaaccggctggtcgtccgctggttgatgactatgttgttgatatcccgcaagatacctggattgaacagccgtgggatatgggcgtcgtattcgtcccgccaatctccggtcgctaaggatcagcttggcgtaatcatggtcatagctgtttcctgtgtgaaattgttatccgctcacaattccacacaacatacgagccggaagcataaagtgtaaagcctggggtgcctaatgagtgagctaactcacattaattgcgttgcgctcactgcccgctttccagtcgggaaacctgtcgtgccagctgcattaatgaatcggccaacgcgcggggagaggcggtttgcgtattgggcgctcttccgcttcctcgctcactgactcgctgcgctcggtcgttcggctgcggcgagcggtatcagctcactcaaaggcggtaatacggttatccacagaatcaggggataacgcaggaaagaacatgtgagcaaaaggccagcaaaaggccaggaaccgtaaaaaggccgcgttgctggcgtttttccataggctccgcccccctgacgagcatcacaaaaatcgacgctcaagtcagaggtggcgaaacccgacaggactataaagataccaggcgtttccccctggaagctccctcgtgcgctctcctgttccgaccctgccgcttaccggatacctgtccgcctttctcccttcgggaagcgtggcgctttctcatagctcacgctgtaggtatctcagttcggtgtaggtcgttcgctccaagctgggctgtgtgcacgaaccccccgttcagcccgaccgctgcgccttatccggtaactatcgtcttgagtccaacccggtaagacacgacttatcgccactggcagcagccactggtaacaggattagcagagcgaggtatgtaggcggtgctacagagttcttgaagtggtggcctaactacggctacactagaaggacagtatttggtatctgcgctctgctgaagccagttaccttcggaaaaagagttggtagctcttgatccggcaaacaaaccaccgctggtagcggtggtttttttgtttgcaagcagcagattacgcgcagaaaaaaaggatctcaagaagatcctttgatcttttctacggggtctgacgctcagtggaacgaaaactcacgttaagggattttggtcatgagattatcaaaaaggatcttcacctagatccttttaaattaaaaatgaagttttaaatcaatctaaagtatatatgagtaaacttggtctgacagttaccaatgcttaatcagtgaggcacctatctcagcgatctgtctatttcgttcatccatagttgcctgactccccgtcgtgtagataactacgatacgggagggcttaccatctggccccagtgctgcaatgataccgcgagacccacgctcaccggctccagatttatcagcaataaaccagccagccggaagggccgagcgcagaagtggtcctgcaactttatccgcctccatccagtctattaattgttgccgggaagctagagtaagtagttcgccagttaatagtttgcgcaacgttgttgccattgctacaggcatcgtggtgtcacgctcgtcgtttggtatggcttcattcagctccggttcccaacgatcaaggcgagttacatgatcccccatgttgtgcaaaaaagcggttagctccttcggtcctccgatcgttgtcagaagtaagttggccgcagtgttatcactcatggttatggcagcactgcataattctcttactgtcatgccatccgtaagatgcttttctgtgactggtgagtactcaaccaagtcattctgagaatagtgtatgcggcgaccgagttgctcttgcccggcgtcaatacgggataataccgcgccacatagcagaactttaaaagtgctcatcattggaaaacgttcttcggggcgaaaactctcaaggatcttaccgctgttgagatccagttcgatgtaacccactcgtgcacccaactgatcttcagcatcttttactttcaccagcgtttctgggtgagcaaaaacaggaaggcaaaatgccgcaaaaaagggaataagggcgacacggaaatgttgaatactcatactcttcctttttcaatattattgaagcatttatcagggttattgtctcatgagcggatacatatttgaatgtatttagaaaaataaacaaataggggttccgcgcacatttccccgaaaagtgccacct

SEQ ID NO: 13 - DNA, 4607 bp, Artificial Sequence
  HA-SE-FUKW2
gacgtctaagaaaccattattatcatgacattaacctataaaaataggcgtatcacgaggccctttcgtctcgcgcgtttcggtgatgacggtgaaaacctctgacacatgcagctcccggagacggtcacagcttgtctgtaagcggatgccgggagcagacaagcccgtcagggcgcgtcagcgggtgttggcgggtgtcggggctggcttaactatgcggcatcagagcagattgtactgagagtgcaccatatgacacgattaccaatacttttgttactaatatcattagtatacgctacaccttttcctcagacatctaaaaaaataggtgatgatgcaactctatcatgtaatcgaaataatacaaatgactacgttgttatgagtgcttggtataaggagcccaattccattattcttttagctgctaaaagcgacgtcttgtattttgataattataccaaggataaaatatcttacgactctccatacgatgatctagttacaactatcacaattaaatcattgactgctagagatgccggtacttatgtatgtgcattctttatgacatcgcctacaaatgacactgataaagtagattatgaagaatactccacagagttgattgtaaatacagatagtgaatcgactatagacataatactatctggatctacacattcaccggaaactagttctgagaaacctgattatatagataattctaattgctcgtcggtattcgaaatctaagctcaaaaattgaaaaactagcgtctttttttgctcgaagtcgaccaccatggtgggtgaggatagcgtgctgatcaccgagaacatgcacatgaaactgtacatggagggcaccgtgaacgaccaccacttcaagtgcacatccgagggcgaaggcaagccctacgagggcacccagaccatgaagatcaaggtggtcgagggcggccctctccccttcgccttcgacatcctggctaccagcttcatgtacggcagcaaaacctttatcaaccacacccagggcatccccgacttctttaagcagtccttccctgagggcttcacatgggagaggatcaccacatacgaagacgggggcgtgctgaccgctacccaggacaccagcctccagaacggctgcctcatctacaacgtcaagatcaacggggtgaacttcccatccaacggccctgtgatgcagaagaaaacactcggctgggaggccagcaccgagatgctgtaccccgctgacagcggcctgagaggccatagccagatggccctgaagctcgtgggcgggggctacctgcactgctccctcaagaccacatacagatccaagaaacccgctaagaacctcaagatgcccggcttctacttcgtggacaggagactggaaagaatcaaggaggccgacaaagagacctacgtcgagcagcacgagatggctgtggccaggtactgcgacctgcctagcaaactggggcacagctgattaattaatttttatcgatctaattcaacaatgtctggagagcttcgcaggatcccgactccggaaccaattactgataaagaagatcatacagttacagacactgtctcatacactacagtaagtacatcatctggaattgtcactactaaatcaaccaccgatgatacgtacaatgataatgatacagtaccaccaactactgtaggcggtagtacaacctctattagcaattataaaaccaaggactttgtagaaatatttggtattaccgcattaattatattgtcggccgtggcaatattctgtattacgtattatatatgtaataaacgttcacgtaaatacaaaacagagaacaaagtctagatttttgacttacataaatgtctgggatagtaaaatctatcagaattctagaaaagtagaaaatatattctaatttattgcacgggatgagcgaaaaatacatcgtcacctgggacatgttgcagatccatgcacgtaaactcgcaagccgactgatgccttctgaacaatggaaaggcattattgccgtaagccgtggcggtctggtaccgggtgcgttactggcgcgtgaactgggtattcgtcatgtcgataccgtttgtatttccagctacgatcacgacaaccagcgcgagcttaaagtgctgaaacgcgcagaaggcgatggcgaaggcttcatcgttattgatgacctggtggataccggtggtactgcggttgcgattcgtgaaatgtatccaaaagcgcactttgtcaccatcttcgcaaaaccggctggtcgtccgctggttgatgactatgttgttgatatcccgcaagatacctggattgaacagccgtgggatatgggcgtcgtattcgtcccgccaatctccggtcgctaaggatcagcttggcgtaatcatggtcatagctgtttcctgtgtgaaattgttatccgctcacaattccacacaacatacgagccggaagcataaagtgtaaagcctggggtgcctaatgagtgagctaactcacattaattgcgttgcgctcactgcccgctttccagtcgggaaacctgtcgtgccagctgcattaatgaatcggccaacgcgcggggagaggcggtttgcgtattgggcgctcttccgcttcctcgctcactgactcgctgcgctcggtcgttcggctgcggcgagcggtatcagctcactcaaaggcggtaatacggttatccacagaatcaggggataacgcaggaaagaacatgtgagcaaaaggccagcaaaaggccaggaaccgtaaaaaggccgcgttgctggcgtttttccataggctccgcccccctgacgagcatcacaaaaatcgacgctcaagtcagaggtggcgaaacccgacaggactataaagataccaggcgtttccccctggaagctccctcgtgcgctctcctgttccgaccctgccgcttaccggatacctgtccgcctttctcccttcgggaagcgtggcgctttctcatagctcacgctgtaggtatctcagttcggtgtaggtcgttcgctccaagctgggctgtgtgcacgaaccccccgttcagcccgaccgctgcgccttatccggtaactatcgtcttgagtccaacccggtaagacacgacttatcgccactggcagcagccactggtaacaggattagcagagcgaggtatgtaggcggtgctacagagttcttgaagtggtggcctaactacggctacactagaaggacagtatttggtatctgcgctctgctgaagccagttaccttcggaaaaagagttggtagctcttgatccggcaaacaaaccaccgctggtagcggtggtttttttgtttgcaagcagcagattacgcgcagaaaaaaaggatctcaagaagatcctttgatcttttctacggggtctgacgctcagtggaacgaaaactcacgttaagggattttggtcatgagattatcaaaaaggatcttcacctagatccttttaaattaaaaatgaagttttaaatcaatctaaagtatatatgagtaaacttggtctgacagttaccaatgcttaatcagtgaggcacctatctcagcgatctgtctatttcgttcatccatagttgcctgactccccgtcgtgtagataactacgatacgggagggcttaccatctggccccagtgctgcaatgataccgcgagacccacgctcaccggctccagatttatcagcaataaaccagccagccggaagggccgagcgcagaagtggtcctgcaactttatccgcctccatccagtctattaattgttgccgggaagctagagtaagtagttcgccagttaatagtttgcgcaacgttgttgccattgctacaggcatcgtggtgtcacgctcgtcgtttggtatggcttcattcagctccggttcccaacgatcaaggcgagttacatgatcccccatgttgtgcaaaaaagcggttagctccttcggtcctccgatcgttgtcagaagtaagttggccgcagtgttatcactcatggttatggcagcactgcataattctcttactgtcatgccatccgtaagatgcttttctgtgactggtgagtactcaaccaagtcattctgagaatagtgtatgcggcgaccgagttgctcttgcccggcgtcaatacgggataataccgcgccacatagcagaactttaaaagtgctcatcattggaaaacgttcttcggggcgaaaactctcaaggatcttaccgctgttgagatccagttcgatgtaacccactcgtgcacccaactgatcttcagcatcttttactttcaccagcgtttctgggtgagcaaaaacaggaaggcaaaatgccgcaaaaaagggaataagggcgacacggaaatgttgaatactcatactcttcctttttcaatattattgaagcatttatcagggttattgtctcatgagcggatacatatttgaatgtatttagaaaaataaacaaataggggttccgcgcacatttccccgaaaagtgccacct

SEQ ID NO: 14 - DNA, 4605 bp, Artificial Sequence
  HA-SL-FUKW2
gacgtctaagaaaccattattatcatgacattaacctataaaaataggcgtatcacgaggccctttcgtctcgcgcgtttcggtgatgacggtgaaaacctctgacacatgcagctcccggagacggtcacagcttgtctgtaagcggatgccgggagcagacaagcccgtcagggcgcgtcagcgggtgttggcgggtgtcggggctggcttaactatgcggcatcagagcagattgtactgagagtgcaccatatgacacgattaccaatacttttgttactaatatcattagtatacgctacaccttttcctcagacatctaaaaaaataggtgatgatgcaactctatcatgtaatcgaaataatacaaatgactacgttgttatgagtgcttggtataaggagcccaattccattattcttttagctgctaaaagcgacgtcttgtattttgataattataccaaggataaaatatcttacgactctccatacgatgatctagttacaactatcacaattaaatcattgactgctagagatgccggtacttatgtatgtgcattctttatgacatcgcctacaaatgacactgataaagtagattatgaagaatactccacagagttgattgtaaatacagatagtgaatcgactatagacataatactatctggatctacacattcaccggaaactagttctgagaaacctgattatatagataattctaattgctcgtcggtattcgaaatctaagctcttttttttttttttttttttggcatataaataagtcgaccaccatggtgggtgaggatagcgtgctgatcaccgagaacatgcacatgaaactgtacatggagggcaccgtgaacgaccaccacttcaagtgcacatccgagggcgaaggcaagccctacgagggcacccagaccatgaagatcaaggtggtcgagggcggccctctccccttcgccttcgacatcctggctaccagcttcatgtacggcagcaaaacctttatcaaccacacccagggcatccccgacttctttaagcagtccttccctgagggcttcacatgggagaggatcaccacatacgaagacgggggcgtgctgaccgctacccaggacaccagcctccagaacggctgcctcatctacaacgtcaagatcaacggggtgaacttcccatccaacggccctgtgatgcagaagaaaacactcggctgggaggccagcaccgagatgctgtaccccgctgacagcggcctgagaggccatagccagatggccctgaagctcgtgggcgggggctacctgcactgctccctcaagaccacatacagatccaagaaacccgctaagaacctcaagatgcccggcttctacttcgtggacaggagactggaaagaatcaaggaggccgacaaagagacctacgtcgagcagcacgagatggctgtggccaggtactgcgacctgcctagcaaactggggcacagctgattaattaatttttatcgatctaattcaacaatgtctggagagcttcgcaggatcccgactccggaaccaattactgataaagaagatcatacagttacagacactgtctcatacactacagtaagtacatcatctggaattgtcactactaaatcaaccaccgatgatacgtacaatgataatgatacagtaccaccaactactgtaggcggtagtacaacctctattagcaattataaaaccaaggactttgtagaaatatttggtattaccgcattaattatattgtcggccgtggcaatattctgtattacgtattatatatgtaataaacgttcacgtaaatacaaaacagagaacaaagtctagatttttgacttacataaatgtctgggatagtaaaatctatcagaattctagaaaagtagaaaatatattctaatttattgcacgggatgagcgaaaaatacatcgtcacctgggacatgttgcagatccatgcacgtaaactcgcaagccgactgatgccttctgaacaatggaaaggcattattgccgtaagccgtggcggtctggtaccgggtgcgttactggcgcgtgaactgggtattcgtcatgtcgataccgtttgtatttccagctacgatcacgacaaccagcgcgagcttaaagtgctgaaacgcgcagaaggcgatggcgaaggcttcatcgttattgatgacctggtggataccggtggtactgcggttgcgattcgtgaaatgtatccaaaagcgcactttgtcaccatcttcgcaaaaccggctggtcgtccgctggttgatgactatgttgttgatatcccgcaagatacctggattgaacagccgtgggatatgggcgtcgtattcgtcccgccaatctccggtcgctaaggatcagcttggcgtaatcatggtcatagctgtttcctgtgtgaaattgttatccgctcacaattccacacaacatacgagccggaagcataaagtgtaaagcctggggtgcctaatgagtgagctaactcacattaattgcgttgcgctcactgcccgctttccagtcgggaaacctgtcgtgccagctgcattaatgaatcggccaacgcgcggggagaggcggtttgcgtattgggcgctcttccgcttcctcgctcactgactcgctgcgctcggtcgttcggctgcggcgagcggtatcagctcactcaaaggcggtaatacggttatccacagaatcaggggataacgcaggaaagaacatgtgagcaaaaggccagcaaaaggccaggaaccgtaaaaaggccgcgttgctggcgtttttccataggctccgcccccctgacgagcatcacaaaaatcgacgctcaagtcagaggtggcgaaacccgacaggactataaagataccaggcgtttccccctggaagctccctcgtgcgctctcctgttccgaccctgccgcttaccggatacctgtccgcctttctcccttcgggaagcgtggcgctttctcatagctcacgctgtaggtatctcagttcggtgtaggtcgttcgctccaagctgggctgtgtgcacgaaccccccgttcagcccgaccgctgcgccttatccggtaactatcgtcttgagtccaacccggtaagacacgacttatcgccactggcagcagccactggtaacaggattagcagagcgaggtatgtaggcggtgctacagagttcttgaagtggtggcctaactacggctacactagaaggacagtatttggtatctgcgctctgctgaagccagttaccttcggaaaaagagttggtagctcttgatccggcaaacaaaccaccgctggtagcggtggtttttttgtttgcaagcagcagattacgcgcagaaaaaaaggatctcaagaagatcctttgatcttttctacggggtctgacgctcagtggaacgaaaactcacgttaagggattttggtcatgagattatcaaaaaggatcttcacctagatccttttaaattaaaaatgaagttttaaatcaatctaaagtatatatgagtaaacttggtctgacagttaccaatgcttaatcagtgaggcacctatctcagcgatctgtctatttcgttcatccatagttgcctgactccccgtcgtgtagataactacgatacgggagggcttaccatctggccccagtgctgcaatgataccgcgagacccacgctcaccggctccagatttatcagcaataaaccagccagccggaagggccgagcgcagaagtggtcctgcaactttatccgcctccatccagtctattaattgttgccgggaagctagagtaagtagttcgccagttaatagtttgcgcaacgttgttgccattgctacaggcatcgtggtgtcacgctcgtcgtttggtatggcttcattcagctccggttcccaacgatcaaggcgagttacatgatcccccatgttgtgcaaaaaagcggttagctccttcggtcctccgatcgttgtcagaagtaagttggccgcagtgttatcactcatggttatggcagcactgcataattctcttactgtcatgccatccgtaagatgcttttctgtgactggtgagtactcaaccaagtcattctgagaatagtgtatgcggcgaccgagttgctcttgcccggcgtcaatacgggataataccgcgccacatagcagaactttaaaagtgctcatcattggaaaacgttcttcggggcgaaaactctcaaggatcttaccgctgttgagatccagttcgatgtaacccactcgtgcacccaactgatcttcagcatcttttactttcaccagcgtttctgggtgagcaaaaacaggaaggcaaaatgccgcaaaaaagggaataagggcgacacggaaatgttgaatactcatactcttcctttttcaatattattgaagcatttatcagggttattgtctcatgagcggatacatatttgaatgtatttagaaaaataaacaaataggggttccgcgcacatttccccgaaaagtgccacct

SEQ ID NO: 15 - DNA, 4632 bp, Artificial Sequence
  HA-SEL-FUKW4
gacgtctaagaaaccattattatcatgacattaacctataaaaataggcgtatcacgaggccctttcgtctcgcgcgtttcggtgatgacggtgaaaacctctgacacatgcagctcccggagacggtcacagcttgtctgtaagcggatgccgggagcagacaagcccgtcagggcgcgtcagcgggtgttggcgggtgtcggggctggcttaactatgcggcatcagagcagattgtactgagagtgcaccatatgacacgattaccaatacttttgttactaatatcattagtatacgctacaccttttcctcagacatctaaaaaaataggtgatgatgcaactctatcatgtaatcgaaataatacaaatgactacgttgttatgagtgcttggtataaggagcccaattccattattcttttagctgctaaaagcgacgtcttgtattttgataattataccaaggataaaatatcttacgactctccatacgatgatctagttacaactatcacaattaaatcattgactgctagagatgccggtacttatgtatgtgcattctttatgacatcgcctacaaatgacactgataaagtagattatgaagaatactccacagagttgattgtaaatacagatagtgaatcgactatagacataatactatctggatctacacattcaccggaaactagttctgagaaacctgattatatagataattctaattgctcgtcggtattcgaaatctaagcttaaaaattgaaattttattttttttttttggaatataaataagctcgaagtcgaccaccatggtgggtgaggatagcgtgctgatcaccgagaacatgcacatgaaactgtacatggagggcaccgtgaacgaccaccacttcaagtgcacatccgagggcgaaggcaagccctacgagggcacccagaccatgaagatcaaggtggtcgagggcggccctctccccttcgccttcgacatcctggctaccagcttcatgtacggcagcaaaacctttatcaaccacacccagggcatccccgacttctttaagcagtccttccctgagggcttcacatgggagaggatcaccacatacgaagacgggggcgtgctgaccgctacccaggacaccagcctccagaacggctgcctcatctacaacgtcaagatcaacggggtgaacttcccatccaacggccctgtgatgcagaagaaaacactcggctgggaggccagcaccgagatgctgtaccccgctgacagcggcctgagaggccatagccagatggccctgaagctcgtgggcgggggctacctgcactgctccctcaagaccacatacagatccaagaaacccgctaagaacctcaagatgcccggcttctacttcgtggacaggagactggaaagaatcaaggaggccgacaaagagacctacgtcgagcagcacgagatggctgtggccaggtactgcgacctgcctagcaaactggggcacagctgattaattaatttttatcgatctaattcaacaatgtctggagagctcggtaccaagcttcgcaggatcccgactccggaaccaattactgataaagaagatcatacagttacagacactgtctcatacactacagtaagtacatcatctggaattgtcactactaaatcaaccaccgatgatacgtacaatgataatgatacagtaccaccaactactgtaggcggtagtacaacctctattagcaattataaaaccaaggactttgtagaaatatttggtattaccgcattaattatattgtcggccgtggcaatattctgtattacgtattatatatgtaataaacgttcacgtaaatacaaaacagagaacaaagtctagatttttgacttacataaatgtctgggatagtaaaatctatcagaattctagaaaagtagaaaatatattctaatttattgcacgggatgagcgaaaaatacatcgtcacctgggacatgttgcagatccatgcacgtaaactcgcaagccgactgatgccttctgaacaatggaaaggcattattgccgtaagccgtggcggtctggtaccgggtgcgttactggcgcgtgaactgggtattcgtcatgtcgataccgtttgtatttccagctacgatcacgacaaccagcgcgagcttaaagtgctgaaacgcgcagaaggcgatggcgaaggcttcatcgttattgatgacctggtggataccggtggtactgcggttgcgattcgtgaaatgtatccaaaagcgcactttgtcaccatcttcgcaaaaccggctggtcgtccgctggttgatgactatgttgttgatatcccgcaagatacctggattgaacagccgtgggatatgggcgtcgtattcgtcccgccaatctccggtcgctaaggatcagcttggcgtaatcatggtcatagctgtttcctgtgtgaaattgttatccgctcacaattccacacaacatacgagccggaagcataaagtgtaaagcctggggtgcctaatgagtgagctaactcacattaattgcgttgcgctcactgcccgctttccagtcgggaaacctgtcgtgccagctgcattaatgaatcggccaacgcgcggggagaggcggtttgcgtattgggcgctcttccgcttcctcgctcactgactcgctgcgctcggtcgttcggctgcggcgagcggtatcagctcactcaaaggcggtaatacggttatccacagaatcaggggataacgcaggaaagaacatgtgagcaaaaggccagcaaaaggccaggaaccgtaaaaaggccgcgttgctggcgtttttccataggctccgcccccctgacgagcatcacaaaaatcgacgctcaagtcagaggtggcgaaacccgacaggactataaagataccaggcgtttccccctggaagctccctcgtgcgctctcctgttccgaccctgccgcttaccggatacctgtccgcctttctcccttcgggaagcgtggcgctttctcatagctcacgctgtaggtatctcagttcggtgtaggtcgttcgctccaagctgggctgtgtgcacgaaccccccgttcagcccgaccgctgcgccttatccggtaactatcgtcttgagtccaacccggtaagacacgacttatcgccactggcagcagccactggtaacaggattagcagagcgaggtatgtaggcggtgctacagagttcttgaagtggtggcctaactacggctacactagaaggacagtatttggtatctgcgctctgctgaagccagttaccttcggaaaaagagttggtagctcttgatccggcaaacaaaccaccgctggtagcggtggtttttttgtttgcaagcagcagattacgcgcagaaaaaaaggatctcaagaagatcctttgatcttttctacggggtctgacgctcagtggaacgaaaactcacgttaagggattttggtcatgagattatcaaaaaggatcttcacctagatccttttaaattaaaaatgaagttttaaatcaatctaaagtatatatgagtaaacttggtctgacagttaccaatgcttaatcagtgaggcacctatctcagcgatctgtctatttcgttcatccatagttgcctgactccccgtcgtgtagataactacgatacgggagggcttaccatctggccccagtgctgcaatgataccgcgagacccacgctcaccggctccagatttatcagcaataaaccagccagccggaagggccgagcgcagaagtggtcctgcaactttatccgcctccatccagtctattaattgttgccgggaagctagagtaagtagttcgccagttaatagtttgcgcaacgttgttgccattgctacaggcatcgtggtgtcacgctcgtcgtttggtatggcttcattcagctccggttcccaacgatcaaggcgagttacatgatcccccatgttgtgcaaaaaagcggttagctccttcggtcctccgatcgttgtcagaagtaagttggccgcagtgttatcactcatggttatggcagcactgcataattctcttactgtcatgccatccgtaagatgcttttctgtgactggtgagtactcaaccaagtcattctgagaatagtgtatgcggcgaccgagttgctcttgcccggcgtcaatacgggataataccgcgccacatagcagaactttaaaagtgctcatcattggaaaacgttcttcggggcgaaaactctcaaggatcttaccgctgttgagatccagttcgatgtaacccactcgtgcacccaactgatcttcagcatcttttactttcaccagcgtttctgggtgagcaaaaacaggaaggcaaaatgccgcaaaaaagggaataagggcgacacggaaatgttgaatactcatactcttcctttttcaatattattgaagcatttatcagggttattgtctcatgagcggatacatatttgaatgtatttagaaaaataaacaaataggggttccgcgcacatttccccgaaaagtgccacct

SEQ ID NO: 16 - DNA, 7983 bp, Artificial Sequence
  pCR-TK-SEL-mRFP1
agcgcccaatacgcaaaccgcctctccccgcgcgttggccgattcattaatgcagctggcacgacaggtttcccgactggaaagcgggcagtgagcgcaacgcaattaatgtgagttagctcactcattaggcaccccaggctttacactttatgcttccggctcgtatgttgtgtggaattgtgagcggataacaatttcacacaggaaacagctatgaccatgattacgccaagctttgttacagatggaagggtcaaacttaataaaggatatttgttcgactttgtgattagtttgatgcgattcaaaaaagaatcctctctagctaccaccgcaatagatcctgttagatacatagatcctcgtcgtgatatcgcattttctaacgtgatggatatattaaagtcgaataaagtgaacaataattaattctttattgtcatcatgaacggcggacatattcagttgataatcggccccatgttttcaggtaaaagtacagaattaattagacgagttagacgttatcaaatagctcaatataaatgcgtgactataaaatattctaacgataatagatacggaacgggactatggacgcatgataagaataattttgaagcattggaagcaactaaactatgtgatgtcttggaatcaattacagatttctccgtgataggtatcgatgaaggacagttctttccagacattgtttaattctgtgagcgtatggcaaacggtaccgagctcggtttggaattagtgaaagcttaaaaattgaaattttattttttttttttggaatataaataagctcgaagtcgacgccaccatggtgaagcgtgagaaaaatgtcatctatggccctgagcctctccatcctttggaggatttgactgccggcgaaatgctgtttcgtgctctccgcaagcactctcatttgcctcaagccttggtcgatgtggtcggcgatgaatctttgagctacaaggagttttttgaggcaaccgtcttgctggctcagtccctccacaattgtggctacaagatgaacgacgtcgttagtatctgtgctgaaaacaatacccgtttcttcattccagtcatcgccgcatggtatatcggtatgatcgtggctccagtcaacgagagctacattcccgacgaactgtgtaaagtcatgggtatctctaagccacagattgtcttcaccactaagaatattctgaacaaagtcctggaagtccaaagccgcaccaactttattaagcgtatcatcatcttggacactgtggagaatattcacggttgcgaatctttgcctaatttcatctctcgctattcagacggcaacatcgcaaactttaaaccactccacttcgaccctgtggaacaagttgcagccattctgtgtagcagcggtactactggactcccaaagggagtcatgcagacccatcaaaacatttgcgtgcgtctgatccatgctctcgatccacgcgtgggcactcagctgattcctggtgtcaccgtcttggtctacttgcctttcttccatgctttcggctttagcattactttgggttactttatggtcggtctccgcgtgattatgttccgccgttttgatcaggaggctttcttgaaagccatccaagattatgaagtccgcagtgtcatcaacgtgcctagcgtgatcctgtttttgtctaagagcccactcgtggacaagtacgacttgtcttcactgcgtgaattgtgttgcggtgccgctccactggctaaggaggtcgctgaagtggccgccaaacgcttgaatcttccagggattcgttgtggcttcggcctcaccgaatctaccagcgctaacattcactctctcggggatgagtttaagagcggctctttgggccgtgtcactccactcatggctgctaagatcgctgatcgcgaaactggtaaggctttgggcccgaaccaagtgggcgagctgtgtatcaaaggccctatggtgagcaagggttatgtcaataacgttgaagctaccaaggaggccatcgacgacgacggctggttgcattctggtgattttggatattacgacgaagatgagcatttttacgtcgtggatcgttacaaggagctgatcaaatacaagggtagccaggttgctccagctgagttggaggagattctgttgaaaaatccatgcattcgcgatgtcgctgtggtcggcattcctgatctggaggccggcgaactgccttctgctttcgttgtcaagcagcctggtaaagaaattaccgccaaagaagtgtatgattacctggctgaacgtgtgagccatactaagtacttgcgtggcggcgtgcgttttgttgactccatccctcgtaacgtaacaggcaaaattacccgcaaggagctgttgaaacaattgttggagaaggccggcggtggttccggagccacgaacttctctctgttaaagcaagcaggagacgtggaagaaaaccccggtcccatggcctcctccgaggacgtcatcaaggagttcatgcgcttcaaggtgcgcatggagggctccgtgaacggccacgagttcgagatcgagggagagggcgagggccgcccctacgagggcacccagaccgccaagctgaaggtgaccaagggcggccccctgcccttcgcctgggacatcctgtcccctcagttccagtacggctccaaggcctacgtgaagcaccccgccgacatccccgactacttgaagctgtccttccccgagggcttcaagtgggagcgcgtgatgaacttcgaggacggcggcgtggtgaccgtgacccaggactcctccctgcaggacggcgagttcatctacaaggtgaagctgcgcggcaccaacttcccctccgacggccccgtaatgcagaagaagaccatgggctgggaggcctccaccgagcggatgtaccccgaggacggcgccctgaagggcgagatcaagatgaggctgaagctgaaggacggcggccactacgacgccgaggtcaagaccacctacatggccaagaagcccgtgcagctgcccggcgcctacaagaccgacatcaagctggacatcacctcccacaacgaggactacaccatcgtggaacagtacgagcgcgccgagggccgccactccaccggcgcctaatgaaagggcgaattctgcagatgggtaattaattaatttttatcgatctaattcaacaatgtctggagagctcggatccttctgtgagcgtatggcaaacgaaggaaaaatagttatagtagccgcactcgatgggacatttcaacgtaaaccgtttaataatattttgaatcttattccattatctgaaatggtggtaaaactaactgctgtgtgtatgaaatgctttaaggaggcttccttttctaaacgattgggtgaggaaaccgagatagagataataggaggtaatgatatgtatcaatcggtgtgtagaaagtgttacgtcggctcataatattatattttttatctaaaaaactaaaaataaacattgattaaattttaatataatacttaaaaatggatgttgtgtcgttagataaaccgtttatgtattttgaggaaattgataatgagttagattacgaaccagaaagtgcaaatgaggtcgcaaaaaaactgccgtatcaaggacagttaaaactattactaggagaattattttttcttagtaagttacagcgacacggtatattagatggtgccaccgtagtgtactagttaacggccgccagtgtgctggaattctagaaaagtagaaaatatattctaatttattgcacgggatgagcgaaaaatacatcgtcacctgggacatgttgcagatccatgcacgtaaactcgcaagccgactgatgccttctgaacaatggaaaggcattattgccgtaagccgtggcggtctggtaccgggtgcgttactggcgcgtgaactgggtattcgtcatgtcgataccgtttgtatttccagctacgatcacgacaaccagcgcgagcttaaagtgctgaaacgcgcagaaggcgatggcgaaggcttcatcgttattgatgacctggtggataccggtggtactgcggttgcgattcgtgaaatgtatccaaaagcgcactttgtcaccatcttcgcaaaaccggctggtcgtccgctggttgatgactatgttgttgatatcccgcaagatacctggattgaacagccgtgggatatgggcgtcgtattcgtcccgccaatctccggtcgctaaggatcagcttggcgtaatcaagccgaattctgcagatatccatcacactggcggccgctcgagcatgcatctagagggcccaattcgccctatagtgagtcgtattacaattcactggccgtcgttttacaacgtcgtgactgggaaaaccctggcgttacccaacttaatcgccttgcagcacatccccctttcgccagctggcgtaatagcgaagaggcccgcaccgatcgcccttcccaacagttgcgcagcctgaatggcgaatggacgcgccctgtagcggcgcattaagcgcggcgggtgtggtggttacgcgcagcgtgaccgctacacttgccagcgccctagcgcccgctcctttcgctttcttcccttcctttctcgccacgttcgccggctttccccgtcaagctctaaatcgggggctccctttagggttccgatttagtgctttacggcacctcgaccccaaaaaacttgattagggtgatggttcacgtagtgggccatcgccctgatagacggtttttcgccctttgacgttggagtccacgttctttaatagtggactcttgttccaaactggaacaacactcaaccctatctcggtctattcttttgatttataagggattttgccgatttcggcctattggttaaaaaatgagctgatttaacaaaaatttaacgcgaattttaacaaaattcagggcgcaagggctgctaaaggaagcggaacacgtagaaagccagtccgcagaaacggtgctgaccccggatgaatgtcagctactgggctatctggacaagggaaaacgcaagcgcaaagagaaagcaggtagcttgcagtgggcttacatggcgatagctagactgggcggttttatggacagcaagcgaaccggaattgccagctggggcgccctctggtaaggttgggaagccctgcaaagtaaactggatggctttcttgccgccaaggatctgatggcgcaggggatcaagatctgatcaagagacaggatgaggatcgtttcgcatgattgaacaagatggattgcacgcaggttctccggccgcttgggtggagaggctattcggctatgactgggcacaacagacaatcggctgctctgatgccgccgtgttccggctgtcagcgcaggggcgcccggttctttttgtcaagaccgacctgtccggtgccctgaatgaactgcaggacgaggcagcgcggctatcgtggctggccacgacgggcgttccttgcgcagctgtgctcgacgttgtcactgaagcgggaagggactggctgctattgggcgaagtgccggggcaggatctcctgtcatcccaccttgctcctgccgagaaagtatccatcatggctgatgcaatgcggcggctgcatacgcttgatccggctacctgcccattcgaccaccaagcgaaacatcgcatcgagcgagcacgtactcggatggaagccggtcttgtcgatcaggatgatctggacgaagagcatcaggggctcgcgccagccgaactgttcgccaggctcaaggcgcgcatgcccgacggcgaggatctcgtcgtgacccatggcgatgcctgcttgccgaatatcatggtggaaaatggccgcttttctggattcatcgactgtggccggctgggtgtggcggaccgctatcaggacatagcgttggctacccgtgatattgctgaagagcttggcggcgaatgggctgaccgcttcctcgtgctttacggtatcgccgctcccgattcgcagcgcatcgccttctatcgccttcttgacgagttcttctgaattgaaaaaggaagagtatgagtattcaacatttccgtgtcgcccttattcccttttttgcggcattttgccttcctgtttttgctcacccagaaacgctggtgaaagtaaaagatgctgaagatcagttgggtgcacgagtgggttacatcgaactggatctcaacagcggtaagatccttgagagttttcgccccgaagaacgttttccaatgatgagcacttttaaagttctgctatgtggcgcggtattatcccgtattgacgccgggcaagagcaactcggtcgccgcatacactattctcagaatgacttggttgagtactcaccagtcacagaaaagcatcttacggatggcatgacagtaagagaattatgcagtgctgccataaccatgagtgataacactgcggccaacttacttctgacaacgatcggaggaccgaaggagctaaccgcttttttgcacaacatgggggatcatgtaactcgccttgatcgttgggaaccggagctgaatgaagccataccaaacgacgagcgtgacaccacgatgcctgtagcaatggcaacaacgttgcgcaaactattaactggcgaactacttactctagcttcccggcaacaattaatagactggatggaggcggataaagttgcaggaccacttctgcgctcggcccttccggctggctggtttattgctgataaatctggagccggtgagcgtgggtctcgcggtatcattgcagcactggggccagatggtaagccctcccgtatcgtagttatctacacgacggggagtcaggcaactatggatgaacgaaatagacagatcgctgagataggtgcctcactgattaagcattggtaactgtcagaccaagtttactcatatatactttagattgatttaaaacttcatttttaatttaaaaggatctaggtgaagatcctttttgataatctcatgaccaaaatcccttaacgtgagttttcgttccactgagcgtcagaccccgtagaaaagatcaaaggatcttcttgagatcctttttttctgcgcgtaatctgctgcttgcaaacaaaaaaaccaccgctaccagcggtggtttgtttgccggatcaagagctaccaactctttttccgaaggtaactggcttcagcagagcgcagataccaaatactgttcttctagtgtagccgtagttaggccaccacttcaagaactctgtagcaccgcctacatacctcgctctgctaatcctgttaccagtggctgctgccagtggcgataagtcgtgtcttaccgggttggactcaagacgatagttaccggataaggcgcagcggtcgggctgaacggggggttcgtgcacacagcccagcttggagcgaacgacctacaccgaactgagatacctacagcgtgagctatgagaaagcgccacgcttcccgaagggagaaaggcggacaggtatccggtaagcggcagggtcggaacaggagagcgcacgagggagcttccagggggaaacgcctggtatctttatagtcctgtcgggtttcgccacctctgacttgagcgtcgatttttgtgatgctcgtcaggggggcggagcctatggaaaaacgccagcaacgcggcctttttacggttcctggccttttgctggccttttgctcacatgttctttcctgcgttatcccctgattctgtggataaccgtattaccgcctttgagtgagctgataccgctcgccgcagccgaacgttgtttaattctgtgagcgtatggcaaacg

SEQ ID NO: 17 - DNA, 3519 bp, Artificial Sequence
  pCR-BluntII-TOPO vector
agcgcccaatacgcaaaccgcctctccccgcgcgttggccgattcattaatgcagctggcacgacaggtttcccgactggaaagcgggcagtgagcgcaacgcaattaatgtgagttagctcactcattaggcaccccaggctttacactttatgcttccggctcgtatgttgtgtggaattgtgagcggataacaatttcacacaggaaacagctatgaccatgattacgccaagctatttaggtgacactatagaatactcaagctatgcatcaagcttggtaccgagctcggatccactagtaacggccgccagtgtgctggaattcgcccttaagggcgaattctgcagatatccatcacactggcggccgctcgagcatgcatctagagggcccaattcgccctatagtgagtcgtattacaattcactggccgtcgttttacaacgtcgtgactgggaaaaccctggcgttacccaacttaatcgccttgcagcacatccccctttcgccagctggcgtaatagcgaagaggcccgcaccgatcgcccttcccaacagttgcgcagcctatacgtacggcagtttaaggtttacacctataaaagagagagccgttatcgtctgtttgtggatgtacagagtgatattattgacacgccggggcgacggatggtgatccccctggccagtgcacgtctgctgtcagataaagtctcccgtgaactttacccggtggtgcatatcggggatgaaagctggcgcatgatgaccaccgatatggccagtgtgccggtctccgttatcggggaagaagtggctgatctcagccaccgcgaaaatgacatcaaaaacgccattaacctgatgttctggggaatataaatgtcaggcatgagattatcaaaaaggatcttcacctagatccttttcacgtagaaagccagtccgcagaaacggtgctgaccccggatgaatgtcagctactgggctatctggacaagggaaaacgcaagcgcaaagagaaagcaggtagcttgcagtgggcttacatggcgatagctagactgggcggttttatggacagcaagcgaaccggaattgccagctggggcgccctctggtaaggttgggaagccctgcaaagtaaactggatggctttctcgccgccaaggatctgatggcgcaggggatcaagctctgatcaagagacaggatgaggatcgtttcgcatgattgaacaagatggattgcacgcaggttctccggccgcttgggtggagaggctattcggctatgactgggcacaacagacaatcggctgctctgatgccgccgtgttccggctgtcagcgcaggggcgcccggttctttttgtcaagaccgacctgtccggtgccctgaatgaactgcaagacgaggcagcgcggctatcgtggctggccacgacgggcgttccttgcgcagctgtgctcgacgttgtcactgaagcgggaagggactggctgctattgggcgaagtgccggggcaggatctcctgtcatctcaccttgctcctgccgagaaagtatccatcatggctgatgcaatgcggcggctgcatacgcttgatccggctacctgcccattcgaccaccaagcgaaacatcgcatcgagcgagcacgtactcggatggaagccggtcttgtcgatcaggatgatctggacgaagagcatcaggggctcgcgccagccgaactgttcgccaggctcaaggcgagcatgcccgacggcgaggatctcgtcgtgacccatggcgatgcctgcttgccgaatatcatggtggaaaatggccgcttttctggattcatcgactgtggccggctgggtgtggcggaccgctatcaggacatagcgttggctacccgtgatattgctgaagagcttggcggcgaatgggctgaccgcttcctcgtgctttacggtatcgccgctcccgattcgcagcgcatcgccttctatcgccttcttgacgagttcttctgaattattaacgcttacaatttcctgatgcggtattttctccttacgcatctgtgcggtatttcacaccgcatacaggtggcacttttcggggaaatgtgcgcggaacccctatttgtttatttttctaaatacattcaaatatgtatccgctcatgagacaataaccctgataaatgcttcaataatagcacgtgaggagggccaccatggccaagttgaccagtgccgttccggtgctcaccgcgcgcgacgtcgccggagcggtcgagttctggaccgaccggctcgggttctcccgggacttcgtggaggacgacttcgccggtgtggtccgggacgacgtgaccctgttcatcagcgcggtccaggaccaggtggtgccggacaacaccctggcctgggtgtgggtgcgcggcctggacgagctgtacgccgagtggtcggaggtcgtgtccacgaacttccgggacgcctccgggccggccatgaccgagatcggcgagcagccgtgggggcgggagttcgccctgcgcgacccggccggcaactgcgtgcacttcgtggccgaggagcaggactgacacgtgctaaaacttcatttttaatttaaaaggatctaggtgaagatcctttttgataatctcatgaccaaaatcccttaacgtgagttttcgttccactgagcgtcagaccccgtagaaaagatcaaaggatcttcttgagatcctttttttctgcgcgtaatctgctgcttgcaaacaaaaaaaccaccgctaccagcggtggtttgtttgccggatcaagagctaccaactctttttccgaaggtaactggcttcagcagagcgcagataccaaatactgtccttctagtgtagccgtagttaggccaccacttcaagaactctgtagcaccgcctacatacctcgctctgctaatcctgttaccagtggctgctgccagtggcgataagtcgtgtcttaccgggttggactcaagacgatagttaccggataaggcgcagcggtcgggctgaacggggggttcgtgcacacagcccagcttggagcgaacgacctacaccgaactgagatacctacagcgtgagctatgagaaagcgccacgcttcccgaagggagaaaggcggacaggtatccggtaagcggcagggtcggaacaggagagcgcacgagggagcttccagggggaaacgcctggtatctttatagtcctgtcgggtttcgccacctctgacttgagcgtcgatttttgtgatgctcgtcaggggggcggagcctatggaaaaacgccagcaacgcggcctttttacggttcctgggcttttgctggccttttgctcacatgttctttcctgcgttatcccctgattctgtggataaccgtattaccgcctttgagtgagctgataccgctcgccgcagccgaacgaccgagcgcagcgagtcagtgagcgaggaagcggaag

SEQ ID NO: 18 - DNA, 678 bp, Artificial Sequence
  mRFP
atggcctcctccgaggacgtcatcaaggagttcatgcgcttcaaggtgcgcatggagggctccgtgaacggccacgagttcgagatcgagggagagggcgagggccgcccctacgagggcacccagaccgccaagctgaaggtgaccaagggcggccccctgcccttcgcctgggacatcctgtcccctcagttccagtacggctccaaggcctacgtgaagcaccccgccgacatccccgactacttgaagctgtccttccccgagggcttcaagtgggagcgcgtgatgaacttcgaggacggcggcgtggtgaccgtgacccaggactcctccctgcaggacggcgagttcatctacaaggtgaagctgcgcggcaccaacttcccctccgacggccccgtaatgcagaagaagaccatgggctgggaggcctccaccgagcggatgtaccccgaggacggcgccctgaagggcgagatcaagatgaggctgaagctgaaggacggcggccactacgacgccgaggtcaagaccacctacatggccaagaagcccgtgcagctgcccggcgcctacaagaccgacatcaagctggacatcacctcccacaacgaggactacaccatcgtggaacagtacgagcgcgccgagggccgccactccaccggcgcctaa

SEQ ID NO: 19 - protein, 225 aa, Artificial Sequence
  mRFP
MASSEDVIKEFMRFKVRMEGSVNGHEFEIEGEGEGRPYEGTQTAKLKVTKGGPLPFAWDILSPQFQYGSKAYVKHPADIPDYLKLSFPEGFKWERVMNFEDGGVVTVTQDSSLQDGEFIYKVKLRGTNFPSDGPVMQKKTMGWEASTERMYPEDGALKGEIKMRLKLKDGGHYDAEVKTTYMAKKPVQLPGAYKTDIKLDITSHNEDYTIVEQYERAEGRHSTGA

SEQ ID NO: 20 - DNA, 708 bp, Artificial Sequence
  TurboFP635
atggtgggtgaggatagcgtgctgatcaccgagaacatgcacatgaaactgtacatggagggcaccgtgaacgaccaccacttcaagtgcacatccgagggcgaaggcaagccctacgagggcacccagaccatgaagatcaaggtggtcgagggcggccctctccccttcgccttcgacatcctggctaccagcttcatgtacggcagcaaaacctttatcaaccacacccagggcatccccgacttctttaagcagtccttccctgagggcttcacatgggagaggatcaccacatacgaagacgggggcgtgctgaccgctacccaggacaccagcctccagaacggctgcctcatctacaacgtcaagatcaacggggtgaacttcccatccaacggccctgtgatgcagaagaaaacactcggctgggaggccagcaccgagatgctgtaccccgctgacagcggcctgagaggccatagccagatggccctgaagctcgtgggcgggggctacctgcactgctccctcaagaccacatacagatccaagaaacccgctaagaacctcaagatgcccggcttctacttcgtggacaggagactggaaagaatcaaggaggccgacaaagagacctacgtcgagcagcacgagatggctgtggccaggtactgcgacctgcctagcaaactggggcacagctga

SEQ ID NO: 21 - protein, 235 aa, Artificial Sequence
  TurboFP635
MVGEDSVLITENMHMKLYMEGTVNDHHFKCTSEGEGKPYEGTQTMKIKVVEGGPLPFAFDILATSFMYGSKTFINHTQGIPDFFKQSFPEGFTWERITTYEDGGVLTATQDTSLQNGCLIYNVKINGVNFPSNGPVMQKKTLGWEASTEMLYPADSGLRGHSQMALKLVGGGYLHCSLKTTYRSKKPAKNLKMPGFYFVDRRLERIKEADKETYVEQHEMAVARYCDLPSKLGHS

SEQ ID NO: 22 - DNA, 20 bp, Artificial Sequence
  Human beta-actin Forward Primer
cctctcccaagtccacacag

SEQ ID NO: 23 - DNA, 16 bp, Artificial Sequence
  Human beta-actin Reverse Primer
ctgcctccacccactc

SEQ ID NO: 24 - DNA, 17 bp, Artificial Sequence
  Murine beta-actin Forward Primer
cgtccatgccctgagtc

SEQ ID NO: 25 - DNA, 19 bp, Artificial Sequence
  Murine beta-actin Reverse Primer
gctgcctcaacacctcaac

SEQ ID NO: 26 - DNA, 51 bp, Artificial Sequence
  Forward-attB1-mRFP
ggggacaagtttgtacaaaaaagcaggctgccaccatggcctcctccgagg

SEQ ID NO: 27 - DNA, 51 bp, Artificial Sequence
  Reverse-attB2-mRFP
ggggaccactttgtacaagaaagctgggtcagaattcgccctttcattagg

SEQ ID NO: 28 - protein, 193 aa, Homo sapiens
  erythropoietin
MGVHECPAWLWLLLSLLSLPLGLPVLGAPPRLICDSRVLERYLLEAKEAENITTGCAEHCSLNENITVPDTKVNFYAWKRMEVGQQAVEVWQGLALLSEAVLRGQALLVNSSQPWEPLQLHVDKAVSGLRSLTTLLRALGAQKEAISPPDAASAAPLRTITADTFRKLFRVYSNFLRGKLKLYTGEACRTGDR

SEQ ID NO: 29 - protein, 272 aa, Artificial Sequence
  anti-VEGF single chain antibody
METDTLLLWVLLLWVPGSTGDEVQLVESGGGLVQPGGSLRLSCAASGFTISDYWIHWVRQAPGKGLEWVAGITPAGGYTYYADSVKGRFTISADTSKNTAYLQMNSLRAEDTAVYYCARFVFFLPYAMDYWGQGTLVTVSSGGGGSGGGGSGGGGSDIQMTQSPSSLSASVGDRVTITCRASQDVSTAVAWYQQKPGKAPKLLIYSASFLYSGVPSRFSGSGSGTDFTLTISSLQPEDFATYYCQQGYGNPFTFGQGTKVEIKRDYKDDDDK

SEQ ID NO: 30 - protein, 121 aa, Homo sapiens
  plasminogen K5 domain
MYRMQLLSCIALSLALVTNSPVVLLPDVETPSEEDCMFGNGKGYRGKRATTVTGTPCQDWAAQEPHRHSIFTPETNPRAGLEKNYCRNPDGDVGGPWCYTTNPRKLYDYCDVPQCAAPSFD

SEQ ID NO: 31 - protein, 264 aa, Artificial Sequence
  human tissue factor-alpha v beta 3-integrin RGD fusion protein
METPAWPRVPRPETAVARTLLLGWVFAQVAGASGTTNTVAAYNLTWKSTNFKTILEWEPKPVNQVYTVQISTKSGDWKSKCFYTTDTECDLTDEIVKDVKQTYLARVFSYPAGNVESTGSAGEPLYENSPEFTPYLETNLGQPTIQSFEQVGTKVNVTVEDERTLVRRNNTFLSLRDVFGKDLIYTLYYWKSSSSGKKTAKTNTNEFLIDVDKGENYCFSVQAVIPSRTVNRKSTDSPVECMGQEKGEFRGRGDSPDYKDDDDK

SEQ ID NO: 32 - protein, 207 aa, Artificial Sequence
  interleukin-24 protein
MNFQQRLQSLWTLASRPFCPPLLATASQMQMVVLPCLGFTLLLWSQVSGAQGQEFHFGPCQVKGVVPQKLWEAFWAVKDTMQAQDNITSARLLQQEVLQNVSDAESCYLVHTLLEFYLKTVFKNYHNRTVEVRTLKSFSTLANNFVLIVSQLQPSQENEMFSIRDSAHRRFLLFRRAFKQLDVEAALTKALGEVDILLTWMQKFYKL

SEQ ID NO: 33 - protein, 520 aa, Artificial Sequence
  SIL-6R/IL-6 fusion protein
MLAVGCALLAALLAAPGAALAPRRCPAQEVARGVLTSLPGDSVTLTCPGVEPEDNATVHWVLRKPAAGSHPSRWAGMGRRLLLRSVQLHDSGNYSCYRAGRPAGTVHLLVDVPPEEPQLSCFRKSPLSNVVCEWGPRSTPSLTTKAVLLVRKFQNSPAEDFQEPCQYSQESQKFSCQLAVPEGDSSFYIVSMCVASSVGSKFSKTQTFQGCGILQPDPPANITVTAVARNPRWLSVTWQDPHSWNSSFYRLRFELRYRAERSKTFTTWMVKDLQHHCVIHDAWSGLRHVVQLRAQEEFGQGEWSEWSPEAMGTPWTESRSPPARGGGGSGGGGSVEPVPPGEDSKDVAAPHRQPLTSSERIDKQIRYILDGISALRKETCNKSNMCESSKEALAENNLNLPKMAEKDGCFQSGFNEETCLVKIITGLLEFEVYLEYLQNRFESSEEQARAVQMSTKVLIQFLQKKAKNLDAITTPDPTTNASLLTKLQAQNQWLQDMTTHLILRSFKEFLQSSLRALRQM

SEQ ID NO: 34 - DNA, 194711 bp, Artificial Sequence
  Vaccinia virus Western Reserve
atttaaaatataatattaatgtactaaaacttatatattattaatttatctaactaaagttagtaaattatatatataattttataattaatttaattttactaattttatttagtgtctagaaaaaaatgtgtgacccatgactgtaggaaactctagagtgtaagaaagatcgatcgctttatagagaccatcagaaagaggtttaatatttttgtgagaccatcgaagagagaaagagataaaacttttttacgactccatcagaaagaggtttaatatttttgtgagaccatcgaagagagaaagagataaaacttttttacgactccatcagaaagaggtttaatatttttgtgagaccatcgaaggagaaagagataaaacttttttacgactccatcagaaagaggtttaatatttttgtgagaccatcgaaggagaaagagataaaacttttttacgactccatcagaaagaggtttaatatttttgtgagaccatcgaagagagaaagagataaaacttttttacgactccatcagaaagaggtttaatatttttgtgagaccatcgaagagagaaagagataaaacttttttacgactccatcagaaagaggtttaatatttttgtgagaccatcgaaggagaaagagataaaacttttttacgactccatcagaaagaggtttaatatttttgtgagaccatcgaagagagaaagagataaaacttttttacgactccatcagaaagaggtttaatatttttgtgagaccatcgaagagagaaagagataaaacttttttacgactccatcagaaagaggtttaatatttttgtgagaccatcgaagagagaaagagataaaacttttttacgactccatcagaaagaggtttaatatttttgtgagaccatcgaagagagaaagagataaaacttttttacgactccatcagaaagaggtttaatatttttgtgagaccatcgaagagagaaagagataaaacttttttacgactccatcagaaagaggtttaatatttttgtgagaccatcgaagagagaaagagaaagagatagttgatctagatatttttcttagtacaaaagtcaatgttttaaaatatatggacaagaatttgtctgtataaaaacttgtgtgaaattttgtaccaaagaaaaaatgtgagcagtatcccctacatggattttactagatcatttatataccaaaaaatattatacgatctacgttttattatatgattttaacgtgtaaattataaacattattttatgatatacaattgtctggtaacctagatgggcataggggatgttgataagctcgacgagtatatgttgttggacgttattgtttaagaaatagttgatgcatcagaaagagaataaaaaatattttagtgagaccatcgaagagagaaagagataaaacttttttacgactccatcagaaagaggtttaatatttttgtgagaccatcgaagagagaaagagataaaacttttttacgactccatcagaaagaggtttaatatttttgtgagaccatcgaagagagaaagagataaaacttttttacgactccatcagaaagaggtttaatatttttgtgagaccatcgaagagagaaagagataaaacttttttacgactccatcagaaagaggtttaatatttttgtgagaccatcgaagagagaaagagataaaacttttttacgactccatcagaaagaggtttaatatttttgtgagaccatcgaagagagaaagagataaaacttttttacgactccatcagaaagaggtttaatatttttgtgagaccatcgaagagagaaagagataaaacttttttacgactccatcagaaagaggtttaatatttttgtgagaccatcgaagagagaaagagataaaacttttttacgactccatcagaaagaggtttaatatttttgtgagaccatcgaagagagaaagagataaaacttttttacgactccatcagaaagaggtttaatatttttgtgagaccatcgaagagagaaagagataaaacttttttacgactccatcagaaagaggtttaatatttttgtgagaccatcgaagagagaaagagataaaacttttttacgactccatcagaaagaggtttaatatttttgtgagaccatcgaagagagaaagagataaaacttttttacgactccatcagaaagaggtttaatatttttgtgagaccatcgaagagagaaagagataaaacttttttacgactccatcagaaagaggtttaatatttttgtgagaccatcgaagagagaaagagataaaacttttttacgactccatcagaaagaggtttaatatttttgtgagaccatcgaagagagaaagagataaaacttttttacgactccatcagaaagaggtttaatatttttgtgagaccatcgaagagagaaagagataaaacttttttacgactccatcagaaagaggtttaatatttttgtgagaccatcgaagagagaaagagataaaacttttttacgactccatcagaaagaggtttaatatttttgtgagaccatcgaagagagaaagagataaaacttttttacgactccatcagaaagaggtttaatatttttgtgagaccatcgaagagagaaagagaataaaaatattttatgactccattgaagagagaaagagaaaatgagaatgagaataaaaatattttagtgacaccatcagaaagaggtttaatatttttgtgagaccatcgaagagagaaagagaataaaaatattttatgactccattgaagagagaaagagaaaatgagaatgagaataaaaatattttagtgacaccatcagaaagaggtttaatattttttatgagaccatcaaagagagaaagagaataaaaatatttttgtaaaactttttttatgagaccatcaaagagagaaagagaataaaaatatttttgtaaaactttttttatgagaccatcaaagagagaaagagaataaaaatatttttgtaaaactttttttatgagaccatcaaagagagaaagagaataaaaatatttttgtaaaactttttttatgagaccatcaaagagagaaagagaataaaaatatttttgtaaaactttttttatgagaccatcaaagagagaaagagaataaaaatatttttgtaaaactttttttatgagaccatcaaagagagaaagagaataaaaatatttttgtaaaactttttttatgagaccatcaaagagagaaagagaataaaaatatttttgtaaaactttttttatgagaccatcagaaagaggtttaatatttttgtgataccctgaaaggaaataggaataggaataggaatagtgtcataatcgtatcacactattgagacagaaaaagaagaagtcgcgagaggtaactttttgtgaatgtagttaagaacatttttgttttgcaaaccggaatatagtgtccggtacacttttttaattcgtggtgtgcctgaatcgttcgattaaccctactcatccaatttcagatgaatagagttatcgattcagacacacgctttgagttttgttgaatcgatgagtgaagtatcatcggttgcaccttcagatgccgatccgtcgacatacttaaatccatccttgacctcaagttcagatgattccttgcacatgtctccgatacgaacgctaaactctagattcttgacacattttgtatcgacgatcgttgaaccgatgatatcttcgtaactcactttcttatgagagatgttagacccgagtactggatgggtcttgatgtcgctgtctttctcttcttcgctacatctgatgtcgatagacacctcacagtctttgatcatagccagagcttcttcatgagtgatcgcgggagagtccttaccttgtcctggggacacgctggacaatctagcattcactgtgtttccatcagcggattctgagatggatttaatctgaggacatttggtgaatccaaagttcattctcagacctccaccgatgatggagtaataagtggtaggaggatctacatcctcgactgatgtggaatcatcttctgattccacctcgggatctggatctgactcggactctgtaatttccgttacggattggcaaatcttatcattggtcggtgtttggtcttgctttgtgactttgataataacatcgattcccatatgatgtttgttttcttcttccgtacacgaggaggaggatgaggatgattgctgaagactggcaggcacatgcatgccaggacgatatattgtttcatgattgctattgattgagtactgttctttatgattctacttccttaccgtgcaataaattagaatatattttctacttttacgagaaattaattattgtatttattatttatgggtgaaaaacttactataaaaagcgggtgggtttggaattagtgatcagtttatgtatatcgcaactaccgggcatatggctatcgacatcgagaacattacccacatgataagagattgtatcagtttcgtagtcttgagtattggtattactatatagtatatagatgtcgacgctagatagacagtctccgaatgcggcatgataccgtcatcattctttgctttcgttaactgtttggaggaaaaatttttgttattgcatttaatctcgaaattcagagtgcacacctttctcctgtaaagaaacctgaagttgctaccttattaaggacggagaagtattcctcacgaaatacgggattacagtctttatgattcatagtaatagttagttccgacgttgagatggattcgctgagaccggtagtggtcgttaactggatacagattaatttccacatcgatatagttaaaggtattactgggtacgggttcgcatttatctgcggaagagacggtgtgagaatatgttccgagaccacacggagaacagatgacgtctccggatactccgtatcctattccacattttgtttgggaaacacatgccttgcatccggatgatcctttgagaagacaataatatccgggagagcattcacagattctattgtgagtcgtgttacacggtcgcgtcttccgttacaacttagacaagcgggtaaatgattattgcgagatgtgaaggtacccgaaccacacggcgtacattgtgtgttagtcttgctatcgcataatctggaagcgtatgttcccggacacaaattatggcgtttgtattcgttgtctttacactttccatcggatggtgcatgcggtgctatatctcttccgtttattattatacatgagagaaacaatatatacgagtataatacggacttcatgatttaataatgtagtaatcgtcgtcttgttcctgtttcctacttctccaatcatatagatattttctttctatcatggataatatttgtaatggttcttttcgtacaacatactgtttagatgatattgcgcataatttccggaggcaaatacgatagtctagattgaccgatggtagactctaatttattgagtgctttgtcgacgagtttacttttacgctccatcgatagatggcactgttctatgagatcgtcgtacatgggaaatgaaatgtgactgtctgaatgtatggctttaagatagctgtgataccgtatacaggtcggtgtcggagattcgaatctctttaaggcgacttatgtcacgatgatggaatctatcttatcgaatgatatatttttcataaatacacttttatagtcctcgtttaaacagaatttactatgtagttccgcgaatgactcgtcccttaataggcagtaggctattatcttctttacgtagtaatcgtcgtagggagagacatcttgtagaacaacgatttaatcataggtagagatactttcagtctgtggtggatgatgtcattcacaacatccgccttgtatatgatgtttctgttttcaaacaccaagtcgaataccgtctttagtcggaaggttgatgtcgtatccgatgtatgaggcaacattgttgttacaattttgaaaggcggtattatagtattcgtctttctgaatgtcgaacctatctagtagataccgtagtatattgagagtgtatccttgattatgttttatgaatagataaagtagatgttgtccttcttccttttgttcgtgccaattgagtaacattatgagaatatgacctgttgcacaatcgttccatgatgggtgtacaatcaagattattacgtatcctcgtatcggctcctcgagataaaagagcatacaccacacgaggactatgtttggtatactgttgaaggtaagtgtgtaaccgcgttaatgtttgctccataatctattatcgcgtagatgaatcgcttctcggctcgcatcttagtgtgacttaacttgtaataattgcttttgtagaacgtggatatgtgtttacagtagtaatgaagagaagtgagttcatcctcgtcggatcctttgtacagaacgtaatagtttaagctcccattgaatttatatctaagataacacagcaatagatcggatgatttactaaagtcatcaatggtgtccgttagtatatcaaagatcttgttatcgattgatagtggtgtcctttttcatccttgctatcaaagttacgcatgccgtggtgtaacaatatctttaatacagatggattaaatcgtgtattcatcgtatagcaatgtaatggagagttacctcgtttattcagatcgcagtgtttaataactagcttaaacagatgagacgatgtatccacatcaaagaacgtgaaatacatatgacagacattgttgacagaaacgtgaccttcattcttaccgtcgtccataaatacgttaggtatgtaccacatactgtcgcgaacgatgcgtacaatctcgtccatctcataatgatttactttttcataattaaagatgtgaaagaaaaacagaacaatatatttttttagtaatgtttatgcgagacatataaaataaactccgtgtttatgatcatttttaacagcaacacattcaatattgtattgttatttttatattatttacacaattaacaatatattattagtttatattactgaattaataatataaaattcccaatcttgtcataaacacacactgagaaacagcataaacacaaaatccatcaaaaatgtcgatgaaatatctgatgttgttgttcgctgctatgataatcagatcattcgccgatagtggtaacgctatcgaaacgacatcgccagaaattacaaacgctacaacagatattccagctatcagattatgcggtccagagggagatggatattgtttacacggtgactgtatccacgctagagatattgacggtatgtattgtagatgctctcatggttatacaggcattagatgtcagcatgtagtattagtagactatcaacgttcagaaaacccaaacactacaacgtcatatatcccatctcccggtattatgcttgtattagtaggcattattattattacgtgttgtctattatctgtttataggttcactcgacgaactaaactacctatacaagatatggttgtgccataatttttataaatttttttatgagtatttttacaaaaaaaatgtataaagtgtatgtcttatgtatatttataaaaatgctaagtatgcgatgtatctatgttatttgtatttatctaaacaatacctctacctctagatattatacaaaaattttttatttcggcatattaaagtaaaatctagttaccttgaaaatgaatacagtgggtggttccgtatcaccagtaagaacataatagtcgaatacagtatccgattgagattttgcatacaatactagtctagaaagaaatttgtaatcatcttctgtgacgggagtccatatatctgtatcatcgtctagtttatcagtgtcccatgctatattcctgttatcatcattagttaatgaaaataactctcgtgcttcagaaaagtcaaatattgtatccatacatacatctccaaaactatcgcttatacgtttatctttaacgatacctatacctagatggttatttactaacagacattttccagatctattgactataactcctatagtttccacatcaaccaagtaatgatcatctattgttatataacaataacataactcttttccatttttatcagtatgtatatctatatcaacgtcgtcgttgtagtgaatagtagtcattgatctattatatgaaacggatatgtctagaacggcaattgttttacgtccagttaacactttctttgatttaaagtctagagtctttgcaaacataatatccttatccgactttatatttcctgtagggtggtataattttattttgcctccacatatcggtgtttccaaatatattactagacaatattccatatagttattagttaagggtacccaattagaacacgtacgcttattatcatcatttggatcgtatttcataaaagttattgtactatcgatgtcaacacattctacattttttaatcgtctatatagtatttttctgatattttctataatatcagaattgtcttccatcggaagttgtatactatcggaatcagttacatgtttaaataattctctgatgtcattccttatacaatcaaattcattattaaacagtttaatagtctgtagacctttatcgtcgtaaatatccattgtcttattagttacgcttatttttatgtgttttacgttgctttattatattttataagaatgattgtttgacgaatcacgagaactattaagacacattattaggtatatattataaaaaagtttttgattacgatgttataagaggaaagaggacacattaacatcatacatcaattaactacattcttataacatcgtaatcaaaagaattgcaattttgatgtataacaactgtcaatgggttatggaattgtatattacatattatacggtatgttggtaacgacaaataccgatcggtaattgtctgccggtgtaatagaattatatatatctatctattacaccggctgagtatgcataataataagttgtggtagtatgatctccatatttataatttaggactttgtattcagtatttttggaatcataaaaaataaaaaaaagttttactaatttaaaatttaaaaagtatttacatttttttcactgtttagtcgcggatatggaattcgatcctgccaaaatcaatacatcatctatagatcatgtaacaatattacaatacatagatgaaccaaatgatataagactaacagtatgcattatccgaaatattaataacattacatattatatcaatatcacaaaaataaatacacatttggctaatcaatttcgggcttggaaaaaacgtatcgccggaagggactatatgactaacttatctagagatacaggaatacaacaatcaaaacttactgaaactatacgtaactgtcaaaaaaatagaaacatatatggtctatatatacactacaatttagttattaatgtggttattgattggataaccgatgtgattgttcaatcaatattaagagggttggtaaattggtacatagctaataatacctatacacccaataatacaacaaccatttctgagttggatatcatcaaaatactggataaatacgaggacgtgtatagagtaagtaaagaaaaagaatgtggaatttgctatgaagttgtttactcaaaacgatagatactttggtttattggattcgtgtactcatatattttgcataacatgcatcaatatatggcataaaacacgaagagaaaccggtgcgtcggataattgtcctatatgtcgtacccgttttagaaacataacaatgagcaagttctataagctagttaactaataaataaaaagtttaatttgttgacgacgtatgtcgttatttttctcgtatgaaagattaaattcaattcaattcgttgtttctaatataatctgccgtattggatggattctcaagacaattgcatttagattatattatcatgaataaaaatagtagcacgcactacttcagccaaatattcttttttgaaacgccatctatcgtagtgaggacacaagtgaacctataattatcaaatttattagtatcagtcacatgaaggactttctgtagagtgacgattctaccatctatggtactaacggtttcatcctccttgataccctcacccaaatgttctataaatttagcatcctcgtccgatctcatatcctttgccaaccaatacatgtagctaaaattaggcataaatttcacacatccagtgcaacgaaattctccagaagatgttacgatgtttaggttaggacatttgatttcgtcggcattaacatatgggtgaacacacccatacatgaaagcgatgagaaataggattctcatcttgccaaaatatcactagaaaaaatttatttatcaattttaaaggtataaaaaatacttattgttgctcgaatattttgtatttgatggtatacggaagattagaaatgtaggtattatcatcaactgattctatggttttatgtattctatcatgtttcactattgcgtcggaaataatatcatatgcttccacatatattttattttgttttaactcataatactcacgtaattctggattattggcatatctatgaataattttagctccatgatcagtaaatattaatgagaacatagtattaccacctaccattatttttttcatttcgttcaattcttgattgcaaagatctatataatcattatagcgttgacttatggactctggaatcttagacgatgtacagtcatctataatcatggcatatttaatacattgttttatagcatagtagttatctacgatgttagatatttctctcaatgaatcaatcacacaatctaatgtaggtttatgacataatagcattttcagcagttcaatgtttctagattcgttgatggcaatggctatacatgtatatccgttatttgatctaatgttgacatctgaaccggattctagcagtaaagatactagagattgtttattatatctaacagccttgtgaagaagtgtttctcctcgtttgtcaatcatgttaatgtctttaagataaggtaggcaaatgtttatagtactaagaattgggcaagcataagacatgtcacaaagaccctttttgtatgtataagtgtaaaaattataacattcatagttggatttacataggtgtccaatcgggatctctccatcatcgagataattgatggcatctcccttccttttttagtagatatttcatcgtgtaagaatcaatattaatatttctaaagtattcgtgtatagcctctttatttaccacagttccatattccactagagggatatcgccgaatgtcatatactcaattagtatatgttggaggacatccgagttcattgttttcaatatcaaaaagatggtttccttatcatttctccatagtggtacaatactacacattattccgtgcggctttccattttccaaaaacaatttgaccaaatctaaatctacatctttattgtatctataatcactatttagataatcagccataattactcgagtgcaacatgttagatcgtctatatatgaataagcagtgttatctattcctttcattaacaatttaacgatgtctatatctatatgagatgacttaatataatattgaagagctgtacaatagtttttatctatagaagacggcttgattccgtgattaattagacatttaacaacttccggacgcacatatgctctcgtatccgactttgaatacagatgagagatgatatacagatgcaatacggtaccgcaatttcgtagttgataatcatcatacgcgtatcagtactcgtcctcataaagaacactgcagccattttctatgaacaaatcaataattttaggaacaggatcattgtcattacataattttctataactgaacgatggttttcacatttaacactcaagtcaaatccatgttctaccaacacctttatcaagtcaacgtctacatttttggatttcatatagctgaatatattaaagtcatttatgttgctaaatccagtggcttctagtagagccatcgctatatcctttaactttaacatgtctactatttgtgtattcttctaatggggtagctgtctccaatttttgcgtaatggattagtgccactgtctagtagtagtttgacgacctcgacattattacaatgctcattaaaaaggtatgcgtgtaaagcattattcttgaattggttcctggtatcattaggatctctgtctctcaacatctgtttaagttcatcgagagccacctcctcattttccagatagtcaaacattttgactgaatgagctactgtgaactctatacacccacacaactaatgtcattaaatattatttttttgaatgtatttataccatgtcaaaaacttgtacaattattaataaaaataatttagtgtttaaattttaccagttccagattttacacctccgttaaccccactttttacaccactggacgatcctcctccccacattccaccgccaccagatgtataagttttagatcctttattactaccatcatgtccatggataaagacactccacatgccgccactactaccccctttagaagacatattaataagacttaaggacaagtttaacaataaaattaatcacgagtaccctactaccaacctacactattatatgattatagtttctatttttacagtaccttaactaaagtctctagtcacaagagcaatactaccaacctacactattatatgattatagtttctatttttataggaacgcgtacgagaaaatcaaatgtctaatttctaacggtagtgttgataaacgattatcgtcaatggatacctcctctatcatgtcgtctattttcttactttgttctattaacttattagcattatatattatttgattataaaacttatattgcttattagcccaatctgtaaatatcggattattaacatatcgtttctttgtaggtttatttaacatgtacatcactgtaagcatgtccgtaccatttattttaatttgacgcatatccgcaatttctttttcgcagtcggttataaattctatatatgatggatacatgctacatgtgtacttataatcgactaatatgaagtacttgatacatattttcagtaacgatttattattaccacctatgaataagtacctgtgatcgtctaggtaatcaactgttttcttaatacattcgatggttggtaatttactcagaataatttccaatatcttaatatataattctgctatttctgggatatatttatctgccagtataacacaaatagtaatacatgtaaacccatattttgttattatattaatgtctgcgccattatctattaaccattctactaggctgacactatgcgacttaatacaatgataaagtatactacatccatgtttatctattttgtttatatcatcaatatacggcttacaaagttttagtatcgataacacatccaactcacgcatagagaaggtagggaataatggcataatatttattaggttatcatcattgtcattatctacaactaagtttccattttttaaaatatactcgacaactttaggatctctattgccaaatttttgaaaatatttatttatatgcttaaatctatataatgtagctccttcatcaatcatacatttaataacattgatgtatactgtatgataagatacatattctaacaatagatcttgtatagaatctgtatatcttttaagaattgtggatattaggatattattacgtaaactattacacaattctaaaatataaaacgtatcacggtcgaataatagttgatcaactatataattatcgattttgtgatttttcttcctaaactgtttacgtaaatagttagatagaatattcattagttcatgaccactatagttactatcgaataacgcgtcaaatatttcccgtttaatatcgcatttgtcaagataataatagagtgtggtatgttcacgataagtataataacgcatctcttttttgtgtgaaattaaatagtttatcacgtccaaagatgtagcataaccatcttgtgacctagtaataatataataatagagaactgttttacccattctatcatcataatcagtggtgtagtcgtaatcgtaatcgtctaattcatcatcccaattataatattcaccagcacgtctaatctgttctattttgatcttgtatccatactgtatgttgctacatgtaggtattcctttatccaataatagtttaaacacatctacattgggatttgatgttgtagcgtatttctctacaatattaataccatttttgatactatttatttctatacctttcgaaattagtaatttcaataagtctatatcgatgttatcagaacatagatattcgaatatatcaaaatcattgatatttttatagtcgactgacgacaataacaaaatcacaacatcgtttttgatattattatttttcttggtaacgtatgcctttaatggagtttcaccatcatactcatataatggatttgcaccactttctatcaatgattgtgcactgctggcatcgatgttaaatgttttacaactatcatagagtatcttatcgttaaccatgattggttgttgatgctatcgcattttttggtttctttcatttcagttatgtatggatttagcacgtttgggaagcatgagctcatatgatttcagtactgtagtgtcagtactattagtttcgatcagatcaatgtctagatctatagaatcaaaacacgataggtcagaagataatgaatatctgtacgcttctttttgtactgtaacttctggttttgttagatggttgcatcgtgctttaacatcaatggtacaaattttatcctcgctttgtgtatcatattcgtctctagtataaaattctatattcagattatcatgcgatgtgtatacgctaacggtatcaataaacggagcacaccatttagtcataacagtaatccaaaattttttaaagtatatcttaacgaaagaagttgtgtcattgtctacggtgtatggtactagatcctcataagtgtatatatctagagtaatgtttaatttattaaatggttgataatatggatcctcatgacaatttccgaagatggaaatgagatatagacatgcaataaatctaatcgaagacatggttactccttaaaaaaatacgaataatcaccttggctatttagtaagtgtcatttaacactatactcatattaatccatggactcataatctctatacgggattaacggatgttctatatacggggatgagtagttttcttctttaactttatactttttactaatcatatttagactgatgtatgggtaatagtgtttaaagagttcgttctcatcatcagaataaatcaatatctctgtttttttgttatacagatgtattacagcctcatatattacgtaatagaacgtgtcatctaccttattaactttcaccgcatagttgtttgcaaatacggttaatcctttgacctcgtcgatttccgaccaatctgggcgtataatgaatctaaactttaatttcttgtaatcattcgaaataatttttagtttgcatccgtagttatcccctttatgtaactgtaaatttctcaacgcgatatctccattaataatgatgtcgaattcgtgctgtatacccatactgaatggatgaactaacgaatatcaacggcgttaatagtaatttactttttcatctttacatattgggtactagttttactatcataagtttataaattccacaagctactatggaataagccaaccatcttagtataccacacatgtcttaaagtttattaattaattacatgttgttttatatatatcgctacgaatttaaagagaaatcagtttaggaagaaaaaaattatctatctacatcatcacgtctctgtattctacgatagagtgctactttaagatgagacatatccgtgtcatcaaaaatatactccattaaaatgattattccggcagcgaacttgatattggatatatcacaacctttgttaatatctacgacaatagacagcagtcccatggttccataaacagtgagtttatctttctttgaagcgatagtttgtagagatcttataaaaccgtcaaacgacatcgcatttatatctttagctaattcatatatgttaccatcgtaatatctaaccgcgtctatcttaaacgtttccatcgctttaaagacgtttccgatagatggtctcatttcatcagtcatactgagccaacaaatataatcgtgtataacatctttgatagaatcagactctaaagaaaacgaatcggctttattatacgcattcatgataaacttaatgaaaaatgtttttcgttgtttaagttggatgaatagtatgtcttaataattgttattatttcattaattaatatttagtaacgagtacactctataaaaacgagaatgacataactagttatcaaagtgtctaggacgcgtaattttcatatggtatagatcctgtaagcattgtctgtattctggagctattttctttatcgcattagtaagttcagaatatgttataaatttaaatcgaataacgaacatgactttagtaaagtcgtctatattaactcttttattttctagccatcgtaataccatgtttaagatagtatattctctagttactacgatctcatcgttgtctagaatatcacatactgaatctacatccaattttagaaattggtctgtgttacatatctcttctatattattgttgatgtattgtcgtagaaaactattacgtagaccattttctttataaaacgaatatatagtactccaattatctttaccgatatatttgcacacataatccattctctcaatcactacatctttaagattttcgttgttaagatatttggctaaactatataattctattagatcatcaacagaatcagtatatatttttctagatccaaagacgaactctttggcgtcctctataatattcccagaaaagatattttcgtgttttagtttatcgagatctgatctgttcatatacgccatgattgtacggtacgttatgataaccgcataaaataaaaatccattttcatttttaaccaatactattcataattgagattgatgtaatactttgttactttgaacgtaaagacagtacacggatccgtatctccaacaagcacgtagtaatcaaatttggtgttgttaaacttcgcaatattcatcaatttagatagaaacttatactcatcatctgttttaggaatccatgtattattaccactttccaacttatcattatcccaggctatgtttcgtccatcatcgttgcgcagagtgaataattcttttgtattcggtagttcaaatatatgatccatgcatagatcggcaaagctattgtagatgtgatttttcctaaatctaatataaaactcgtttactagcaaacactttcctgatttatcgaccaagacacatatggtttctaaatctatcaagtggtggggatccatagttatgacgcagtaacatagattattacattcttgactgtcgctaatatctaaatatttattgttatcgtattggattctgcatatagatggcttgtatgtcaaagatatagaacacataaccaatttatagtcgcgctttacattctcgaatctaaagttaagagatttagaaaacattatatcctcggatgatgttatcactgtttctggagtaggatatattaaagtctttacagatttcgtccgattcaaataaatcactaaataatatcccacattatcatctgttagagtagtatcattaaatctattatattttatgaaagatatatcactgctcacctctatatttcgtacatttttaaactgtttgtataatatctctctgatacaatcagatatatctattgtgtcggtagacgataccgttacatttgaattaatggtgttccattttacaacttttaacaagttgaccaattcatttctaatagtatcaaactctccatgattaaatattttaatagtatccattttatatcactacggacacaaagtagctgacataaaccattgtataatttttatgttttatgtttattagcgtacacattttggaagttccggcttccatgtatttcctggagagcaagtagatgatgaggaaccagatagtttatatccgtacttgcacttaaagtctacattgtcgttgtatgagtatgatcttttaaacccgctagacaagtatccgtttgatattgtaggatgtggacatttaacaatctgacacgtgggtggatcggaccattctcctcctgaacacaggacaccagagttaccaatcaacgaatatccactattgcaactataagttacaacgctcccatcggtataaaaatcctcgtatccgttatgtcttccgttggatatagatggaggggattggcatttaacagattcacaaataggtgcctcgggattccataccatagatccagtagatcctaattcacaatacgatttagattcaccgatcaaatgatatccgctattacaagagtacgttatactagagccaaagtctactccaccaatatcaagttggccattatcgatatctcgaggcgatgggcatctccgtttaatacattgattaaagagtgtccatccagtacctgtacatttagcatatataggtcccattttttgctttctgtatccaggtagacatagatattctatagtgtctcctatgttgtaattagcattagcatcagtctccacactattcttaaatttcatattaatgggtcgtgacggaatagtacagcatgatagaacgcatcctattcccaacaatgtcaggaacgtcacgctctccaccttcatatttatttatccgtaaaaatgttatcctggacatcgtacaaataataaaaagcccatatatgttcgctattgtagaaattgtttttcacagttgctcaaaaacgatggcagtgacttatgagttacgttacactttggagtctcatctttagtaaacatatcataatattcgatattacgagttgacatatcgaacaaattccaagtatttgattttggataatattcgtattttgcatctgctataattaagatataatcaccgcaagaacacacgaacatctttcctacatggttaaagtacatgtataattctatccatttgtcttccttaactatatatttgtatagataattacgagtctcgtgagtaattccagtaattacatagatgtcgccgtcgtactctacagcataaactatactatgatgtctaggcatgggagacttttttatccaacgatttttagtgaaacattccacatcgtttaatactacatatttttcatacgtggtataaactccacccattacatatatatcatcgtttacgaataccgacgcgcctgaatatctaggagtaattaagtttggaagtcttatccatttcgaagtgccgtgtttcaaatattctgccacacccgttgaaatagaaaattctaatcctcctattacatataactttccatcgttaacacaagtactaacttctgattttaacgacgacatattagtaaccgttttccattttttcgtttcaagatctacccgcgatacggaataaacatgtctattgttaatcatgccgccaataatgtatagacaattatgtaaaacatttgcattatagaattgtctatctgtattaccgactatcgtccaatattctgttctaggagagtaatgggttattgtggatatataatcagagtttttaatgactactatattatgttttataccatttcgtgtcactggctttgtagatttggatatagttaatcccaacaatgatatagcattgcgcatagtattagtcataaacttgggatgtaaaatgttgatgatatctacatcgtttggatttttatgtatccactttaataatatcatagctgtaacatcctcatgatttacgttaacgttttcgtgggataagatagttgtcagttcatcctttgataattttccaaattctggatcggatgtcaccgcagtaatattgttgattatttctgacatcgacgcattatatagttttttaattccatatcttttagaaaagttaaacatccttatacaatttgtggaattaatattatgaatcatagtttttacacatagatctactacaggcggaacatcaattattatggcagcaactagtatcatttctacattgtttatggtgatgtttatcttcttccagcgtatatagtctaatagcgattcaaacgcgtgatagtttataccattcaatataatcgcttcatcctttagatggtgatcctgaattcgtttaaaaaaattatacggagatgccgtaataatttccttattcacttgtataatttccccattgatagaaaatatcacgctttccattcttgaagtactataagtaattatagtataatgtaaaggtttatatattcaatattttttataaaaaaatcattttgacattaattcctttttaaatttccgtctatcatctatagaaacgtattctatgaatttataaaatgcttttacgtgtcctatcgtaggcgatagaaccgctaaaaagcctatcgaatttctacaaaagaatctgttatatggtatagggagagtataaaacattaaatgtccgtacttattaaagtattcagtagccaatcctaactctttcgaatacttattaatggctcttgttctgtacgaatctatttttttgaacaacggacctagtggtatatcttgttctatgtatctaaaataatgtctgactagatccgttagtttaatatcctcagtcatcttgtctagaatggcaaatctaactgcgggtttaggctttagtttagtttttatatctacatctatgtctttatctaacaccaaaaatataatagctaatattttattacaatcatccggatattcttctacgatctcactaactaatgtttctttggttatactagtatagtcactatcggacaaataaagaaaatcagatgatcgatgaataatacatttaaattcatcatctgtaagatttttgagatgtctcattaaaatattattagggtcagtactcattatcattcggcagctattacttattttatttttctgtattttattatttttcaccatatagatcaatcattagatcatcaaaatatgtttcaatcatcctaaagagtatggtgaatgactcttcccatctaatttctgaacgttcaccaatgtctctagccactttggcactaatagcgatcattcgcttagcgtcttctatattattaactggttgattcaatctatctagcaatggaccgtcggacagcgtcattctcatgttcttaatcaatgtacatacatcgccgtcatctaccaattcatccaacaacataagctttttaaaatcatcattataataggtttgatcgttgtcatttctccaaagaatatatctaataagtagagtcctcatgcttagtaatttaactattttagttaacaactattttttatgttaaatcaattagtacaccgctatgtttaatacttattcatattttagtttttaggattgagaatcaatacaaaaaattaatgcatcattaattttagaaatacttagtttccacgtagttaatgaaacatttgaactcatcgtacaggacgttctcgtacaggacgtaactataaaccggtttatatttgttcaagatagatacaaatccgataactttttttacgaattctacgggatccactttaaaagtgtcataccgggttctttttattcttttaaacagatcaatggtgtgatgttgattaggtcttttacgaatttgatatagaatagcgttcacatatcctccataatggtcaatcgccatttgttcgtatgtcataaattctttaattatatgacactgtgtattatttagttcatccttgttcatcattaggaatctatccaaaatggcaattatactagaactataggtgcgttgtatacacatattgatgtgtctgtttatacaatccatgatatttggatccatgctactaccttcgggtaaaattgtagcatcatataccatttctagtactttaggttcattattatccattgcagaggacgtcatgatcgaatcctaaaaaaatatattatttttatgttattttgttaaaaataatcatcgaatacttcgtaagatactccttcatgaacataatcagttacaaaacgtttatatgaagtaaagtatctacgatttttacaaaagtccggatgcataagtacaaagtacgcgataaacggaataataatagatttatctagtctatctttttctatagctttcatagttagatacatggtctcagaagtaggattatgtaacatcagcttcgataaaatgactgggttatttagtcttacacattcgctcatacatgtatgaccgttaactacaaagtctacactaaaatgattgaacaatagatagtctaccattgtttcgtattcagatagtacagcgtagtacatagcatcttcacaaattatatcattgtctaatagatatttgacgcatcttatggatcccacttcaacagccatcttaaaatcggtagaatcatattgctttcctttatcattaataatttctaaaacatcatctctatcataaaagatacaaatattaactgtttgatccgtaataacattgctagtcgatagcaatttgttaataagatgcgctgggctcaatgtcttaataagaagtgtaagaggactatctccgaatttgttttgtttattaacatccgttgatggaagtaaaagatctataatgtctacattcttgactgttttagagcatacaatatggagaggtgtatttccatcatgatctggttttgagggactaattcctagtttcatcatccatgagattgtagaagcttttggattgtctgacataagatgtctatgaatatgatttttgccaaatttatccactatcctggcttcgaatccgatggacattatttttttaaacactctttctgaaggatctgtacacgccaacaacggaccacatccttcttcatcaaccgagttgttaatcttggctccatactgtaccaataaatttattctctctatgacttcatcatctgttcccgagagataatatagaggtgttttattatgtttatcacacgcgtttggatctgcgccgtgcgtcagcagcatcgcgactattctattattattaattttagaagctatatgcaatggataatttccatcatcatccgtctcatttggagagtatcctctatgaagaagttcttcgacaaatcgttcatctagtcctttaattccacaatacgcatgtagaatgtgataattatttccagaaggttcgatagcttgtagcatattcctaaatacatctaaatttttactattatatttggcataaagagatagataatactcggccgacataatgttgtccattgtagtataaaaattaatatttctatttctatttctgtatatttgcaacaatttactctctataacaaatatcataacttagttcttttatgtcaagaaggcactggtttagttcatctataaatgtcacgccataactaccacgcatgctatactcagaattatgataaagatatttatccttggggtgtaggtaatggggattaatctttgttggatcagtctctaagttaacacatgtcacacatgatccatttatagttatatcacacgatgatgatttatgaattgattccggaagatcgctatcgtattttgtggttccacaattcatttccatacatgttattgtcacactaatattatgatgaactttatctagccgctgagtggtaaacaacagaacagatagtttattatctttaccaacaccctcagccgctgccacaaatctctgatccgtatccatgatggtcatgtttatttctagtccgtatccagtcaacactatgttagcatttctgtcgatatagctttcactcatatgacactcaccaataatagtagaattaatgtcgtaatttacaccaatagtgagttcggcggcaaagtaccaataccggtaatcttgtcgaggaggacatatagtattcttgtattctaccgaatacccgagagatgcgatacaaaagagtaagactaatttgtaaaccatcttactcaaaatatgtaacaatagtacgatgcaatgagtaagacaataggaaatctatcttatatacacataattattctatcaattttaccaattagttagtgtaatgttaacaaaaatgtgggagaatctaattagtttttctttacacaattgacgtacatgagtctgagttccttgtttttgctaattatttcatccaatttattattcttgactatatcgagatcttttgtataggagtcagacttgtattcaacatgcttttctataatcattttagctatttcggcatcatccaatagtacattttccagattagcagaatagatattaatgtcgtatttgaacagagcctgtaacatctcaatgtctttattatctatagccaatttaatgtccggaatgaagagaagggaattattggtgtttgtcgacgtcatatagtcgagcaagagaatcatcatatccacgtgtccattttttatagtgatgtgaatacaactaaggagaatagccagatcaaaagtagatggtatctctgaaagaaagtaggaaacaatacttacatcattaagcatgacggcatgataaaatgaagttttccatccagttttcccatagaacatcagtctccaatttttcttaacaaacagttttaccgtttgcatgttaccactatcaaccgcataatacaatgcggtgtttcccttgtcatcaaattgtgaatcatccagtccactgaatagcaaaatctttactattttggtatcttccaatgtggctgcctgatgtaatggaaattcattctctagaagatttttcaatgctccagcgttcaacaacgtacatactagacgcacgttattatcagctattgcataatacaaggcactatgtccatggacatccgccttaaatgcatctttgctagagagaaagcttttcagctgcttagacttccaagtattaattcgtgacagatccatgtctgaaacgagacgctaattagtgtatattttttcattttttataattttgtcatattgcaccagaattaataatatctctaatagatctgattagtagatacatggctatcgcaaaacaacatatacacatttaataaaaataatatttattaagaaaattcagatttcacgtacccatcaatataaataaaataatgattccttacaccgtacccatattaaggagattccaccttacccataaacaatataaatccagtaatatcatgtctgatgatgaacacaaatggtgtattaaattccagtttttcaggagatgatctcgccgtagctaccataatagtagatgcctctgctacagttccttgttcgtcgacatctatctttgcattctgaaacattttataaatatataatgggtccctagtcatatgtttaaacgacgcattatctggattaaacatactaggagccatcatttcggctatcgacttaatatccctcttattttcgatagaaaatttagggagtttaagattgtacactttattccctaattgaaacgaccaatagtctaattttgcagccgtaatagaatctgtgaaatgggtcatattatcacctattgccaggtacatactaatattagcatccttatacggaaggcgtaccatatcatattcttcgtcatcgattgtgattgtatttccttgcaatttagtaactacgttcatcatgggaaccgttttcgtaccgtacttattagtaaaactagcattgcgtgttttagtgatatcaaacggatattgccatatacctttaaaatatatagtattaatgattgcccatagagtattattgtcgagcatattagaatctactacattagacataccggatctacgttctactatagaattaattttattaaccgcatctcgtctaaagtttaatctatataggccgaatctatgatattgttgataatacgacggtttaatgcacacagtattatctacgaaactttgataagttagatcagtgtacgtatatttagatgttttcagcttagctaatcctgatattaattctgtaaatgctggacccagatctctttttctcaaatccatagtcttcaataattctattctagtattacctgatgcaggcaatagcgacataaacatagaaaacgaataaccaaacggtgagaagacaatattatcatcttgaatatttttatacgctactataccggcattggtaaatccttgcagacgataggtagacactgaacacgttaacgatagtatcaataacgcaatcatgattttatggtattaataattaaccttatttttatgttcggtataaaaattattgatgtctacacatccttttgtaattgacatctatatatccttttgtataatcaactctaatcactttaacttttacagttttccctaccagtttatccctatattcaacatatctatccatatgcatcttaacactctctgccaagatagcttcaaagtgaggatagtcaaaaagataaatatatagagcataatccttctcgtatactctgccctttattacatcacccgcattgggcaacgaataacaaaatgcaagcatcttgttaacgggctcgtaaattgggataaaaattatgtttttatatctattttattcaagagaatattcaggaatttctttttccggttgtatctcatcgcagtatatatcatttgtacattgtttcatattttttaatagtctacaccttttagtaggactagtatcgtacaattcatagctgtattttgaattccaatcacgcataaaaatatcttccaattgttgacgaagacctaatccatcatccggtgtaatattaatagatgctccacatgtatccgtaaagtaatttcctgtccaatttgaggtacctatatacgccgttttatcggttaccatatatttggcatggtttaccctagaatacggaatgggaggatcagcatctggtacaataaatagctttacttctatatttatgtttttagattttagcatagcgatagatcttaaaaagtttctcatgataaacgaagatcgttgccagcaactaatcaatagcttaactgacacttgtctgtctatagcggctcttcttaattcatcttctatataaggccaaaacaaaatattgcctgccttcgaataaataatagggataaagttcataacagatacataaacgaatttactcgcatttctgatacatgacaataaagcggttaaatcattggttctttccatagtacatagttgttgcggtgcagaagcaataaatacagagtgtggaacgccgcttacgttaatactaagaggatgatctgtattataatacgacggataaaagtttttccaattatatggtagattgttaactccaagataccagtatacctcaaaaatttgagtgagatccgctgccaagttcctattattgaagatcgcaatacccaattctttgacctgagttagtgatctccaatccatgttagcgcttcctaaataaatatgtgtattatcagatatccaaaattttgtatgaagaactcctcctaggatatttgtaatatctatgtatcgtacttcaactccggccatttgtagtctttcaacatcctttaatggtttgttagatttattgacggctactctaactcgtactcctcttttgggtaattgtacaatcttgtttaatattatcgtgccgaaattcgtacccacttcatccgataaactccaataaaaagatgatatatctagtgtttttgtggtattggatagaatttccctccacatgttaaatgtagacaaatatactttatcaaattgcatacctataggaatagtctctgtaatcactgcgattgtattatccggattcattttatttgttaaaagaataatcctatatcacttcactctattaaaaatccaagtttctatttctttcatgactgattttttaacttcatccgtttccttatgaagatgatgtttggcaccttcataaatttttatttctctattacaatttgcatgttgcatgaaataatatgcacctaaaacatcgctaatcttattgtttgttccctggagtatgagagtcggggggtgttaatcttggaaattatttttctaaccttgttggtagccttcaagacctgactagcaaatccagccttaattttttcatgattgattaatgggtcgtattggtatttataaactttatccatatctctagatactgattctggacatagctttccgactggcgcatttagtgtgatggttcccataagtttggcagctagcagattcagttttgaaacagcatctgcattaactagaggagacattagaatcattgctgtaaacaagtttggattatcgtaagaggctagctcccatggaatgacccaataagtagatttaatagttaccacgtgctgtaccaaagtcatcaatcatcattttttcaccattacttcttccatgtccaatatgatcatgtgagaatactaaaattcctaacgatgatatgttttcagctagttcgtcataacgtccagaatgtttaccagctccatgacttatgaatactaatgccttaggatatgtaataggtttccaatatatgtaatcattgtccagattgaacatacagtttgcactcatgattcacgttatataactatcaatattaacagttcgtttgatgatcatattatttttatgttttattgataattgtaaaaacatacaattaaatcaatatagaggaaggagacggctactgtcttttgtgagatagtcatggcgactaaattagattatgaggatgctgttttttactttgtggatgatgataaaatatgtagtcgcgactccatcatcgatctaatagatgaatatattacgtggagaaatcatgttatagtgtttaacaaagatattaccagttgtggaagactgtacaaggaattgatgaagttcgatgatgtcgctatacggtactatggtattgataaaattaatgagattgtcgaagctatgagcgaaggagaccactacatcaattttacaaaagtccatgatcaggaaagtttattcgctaccataggaatatgtgctaaaatcactgaacattggggatacaaaaagatttcagaatctagattccaatcattgggaaacattacagatctgatgaccgacgataatataaacatcttgatactttttctagaaaaaaaattgaattgatgatataggggtcttcataacgcataattattacgttagcattctatatccgtgttaaaaaaaattatcctatcatgtatttgagagttttatatgtagcaaacatgatagctgtgatgccaataagctttagatattcacgcgtgctagtgttagggatggtattatctggtggtgaaatgtccgttatataatctacaaaataatcatcgcatatagtatgcgatagtagagtaaacatttttatcgtttctactgggttcatacatcgtctacccaattcggttataaatgaaattgtcgccaatcttacacccaaccccttgttatccattagtatagtattaacttcgttatttatgtcataaactgtaaatgattttgtagatgccatatcatacatgatattcatgtccctattataatcattactaactttatcacaatatatgttgataatatctatatatgatctagtctttgtgggcaactgtctatacaagtcgtctaaacgttgtttactcatatagtatcgaacagccatcattacatggtcccgttccgttgatagataatcgagtatgttagtggacttgtcaaatctatataccatattttctggaagtggatatacatagtcgtgatcaacattattgctagcctcatcttctatatcctgtactataccattatctatatcatctacataatctacgatattattacacataaacatcgacaacatactattgtttattatctaagtcctgttgatccaaacccttgatctcctctatttgtactatctagagattgtacttcttccagttctggataatatatacgttgatagattagctgagctattctatctccagtatttacattaaacgtacattttccattattaataagaatgactcctatgtttcccctataatcttcgtctattacaccgcctcctatatcaatgccttttagggacagaccagacctaggagctattctaccatagcagaacttaggcatggacatactaatatctgtcttaattaactgtcgttctcctggagggatagtataatcgtaagcgctatataaatcatatccggcggcgtaaggtgattgcctagtaggagatttagctctgttagtttccttaacaaatctaactggtgagttaatattcatgttgaacataaaactaatattttatttcaaaattatttaccatcccatatattccatgaataagtgtgatgattgtacacttctatagtatctatatacgattcacgataaaatcctcctatcaatagcagtttattatccactatgatcaattctggattatccctcggataaataggatcatctatcagagtccatgtattgctggattcacaataaaattccgcatttctaccaaccaagaataaccttctaccgaacactaacgcgcatgatttataatgaggataataagtggatggtccaaactgccactgatcatgattgggtagcaaatattctgtagttgtatcagtttcagaatgtcctcccattacgtatataacattgtttatggatgccactgctggattacatctaggtttcagaagactcggcatattaacccaagcagcatccccgtggaaccaacgctcaacagatgtgggatttggtagacctcctactacgtataatttattgttagcgggtatcccgctagcatacagtctggggctattcatcggaggaattggaatccaattgtttgatatataatttaccgctatagcattgttatgtatttcattgttcatccatccaccgatgagatatactacttctccaacatgagtacttgtacacatatggaatatatctataatttgatccatgttcataggatactctatgaatggatacttgtatgatttgcgtggttgtttatcacaatgaaatattttggtacagtctagtatccattttacattatttatacctctgggagaaagataatttgacctgattacatttttgataaggagtagcagatttcctaatttatttcttcgctttatataccacttaatgacaaaatcaactacataatcctcatctggaacatttagttcatcgctttctagaataagtttcatagatagataatcaaaattgtctatgatgtcatcttccagttccaaaaagtgtttggcaataaagtttttagtatgacataagagattggatagtccgtattctatacccatcatgtaacactcgacacaatattcctttctaaaatctcgtaagataaagtttatacaagtgtagatgataaattctacagaggttaatatagaagcacgtaataaattgacgacgttatgactatctatatatacctttccagtatacgagtaaataactatagaagttaaactgtgaatgtcaaggtctagacaaacccttgtaactggatctttatttttcgtgtatttttgacgtaaatgtgtgcgaaagtaaggagataactttttcaatatcgtagaattgactattatattgccacctatagcatcaataattgttttgaatttcttagtcatagacaatgctaatatattcttacagtacacagtattaacaaatatcggcatttatgtttctttaaaagtcaacatctaaagaaaaatgattatcttcttgagacataactcccattttttggtattcacccacacgtttttcgaaaaaattagtttttccttccaatgatatattttccatgaaatcaaacggattggtaacattataaatttttttaaatcccaattcagaaatcaatctatccgcgacgaattctatatatgttttcatcatttcacaattcattcctataagtttaactggaagagccgcagtaagaaattcttgttcaatggataccgcatctgttataatagatctaacggtttcttcactcggtggatgcaataaatgtttaaacatcaaacatgcgaaatcgcagtgcagaccctcgtctctactaattagttcgttggaaaacgtgagtccgggcattaggccacgctttttaagccaaaatatggaagcgaatgatccagaaaagaagattccttctactgcagcaaaggcaataagtctctctccataaccggcgctgtcatgtatccacttttgagcccaatcggccttcttttttacacaaggcatcgtttctatggcattaaagagatagtttttttcattactatctttaacataagtatcgatcaaaagactatacatttccgaatgaatgttttcaatggccatctgaaatccgtagaaacatctagcctcggtaatctgtacttctgtacaaaatcgttccgccaaattttcattcactattccgtcactggctgcaaaaaacgccaatacatgttttataaaatatttttcgtctggtgttagtttattccaatcattgatatctttagatatatctacttcttccactgtccaaaatgatgcctctgcctttttatacatgttccagatgtcataatattggattgggaaaataacaaatctatttggatttggtgcaaggatgggttccataactaaattaacaataacaataaattttttttcagttatctatatgcctgtacttggatcttttgtacatcgatatcgccgcaatcactacaataattacaagtattattgatagcattgttattagtactatcataattaaattatcgacattcatgggtgctgaataatcgttattatcatcattatcattttgtaattgtgacatcatactagataaatcgtttgcgagattgttgtgggaagcgggcatggaggatgaattatcgttattattatttaacgcctcccattcggattcacaaatgttacgcacattcaacattttatggaaactataattttgtgaaaacagataacaagaaaactcgtcatcgttcaaatttttaacgatagtaaaccgattaaacgtcgagctaatttctaacgctagcgactctgttggatatgggtttccagatatatatcttttcagttcccctacgtatctataatcatctgtaggaaatggaagatatttccatttatctactgttcctaatatcatatgtggtggtgtagtagaaccattaagcgcgaaagatgttatttcgcatcgtattttaacttcgcaataatttctggttagataacgcactctaccagtcaagtcaatgatattagcctttacagatatattcatagtagttgtaacgatgactccatcttttagatgcgatactcctttgtatgtaccagaatcttcgtaccgcaaactcgatatatttaaacaagttaatgagatattaacgcgttttatgaatgatgatatataaccagaagttttatcctcggtggctagcgctataaccttatcattataataccaactagtgtgattaatatgtgacacgttagtgtgggtacaaatatgtacattatcgtctacgtcgtattcgatacatccgcatacagccaacaaatataaaatgacaaatactctaacgccgttcgtacccatcttgatgcggtttaataaatgttttgatttcaatttattgtaaaaaaagattcggttttatactgttcgatattctcattgcttatattttcatctatcatctccacacagtcaaatccgtggttagcatgcacctcatcaaccggtaaaagactatcggactcttctatcattataactctagaatatttaatttggtcattattaatcaagtcaattatcttatttttaacaaacgtgagtattttactcattttttataaaaacttttagaaatatacagactctatcgtgtgtctatatcttctttttatatccaatgtatttatgtctgatttttcttcatttatcatatataatggtccaaattctacacgtgcttcggattcatccagatcattaaggttcttataattgtaacatccttctcttccctcttctacatcttccttcttattcttattcttagcgtcacagaatctaccacagcaggatcccatgacgagcgtcatattaaactaatccattttcaattataatatacgattagtaatgaccattaaaataaaaaatattcttcataaccggcaagaaagtgaaaagttcacattgaaactatgtcagtagtatacatcatgaaatgatgatatatatatactctattttggtggaggattatatgatataattcgtggataatcattcttaagacacatttcttcattcgtaaatcttttcacgttaaatgagtgtccatattttgcaatttcttcatatgatggcggtgtacgtggacgaagctgctcctgttcttgttgtagtcgccgactgtcgtgtttgcgtttagatccctccattatcgcgattgcgtagatggagtactattatataccttgtaattaaatttttttattaattaaacgtataaaaacgttccgtatctgtatttaagagccagatttcgtctaatagaacaaatagctacagtaaaaataactagaataattgctacacccactagaaaccacggatcgtaatacggcaatcggttttcgataataggtggaacgtatattttatttaaggacttaacaattgtctgtaaaccacaatttgcttccgcggatcctgtattaactatctgtaaaagcatatgttgaccgggcggagccgaacattctccgatatctaatttctgtatatctataatattattaacctccgcatacgcattacagttcttttctagcttggataccgcactaggtacatcgtctagatctattcctatttcttcagcgatagctcttctatccttttccggaagcaatgaaatcacttcaataaatgattcaaccatgagtgtgaaactaagtcgagaattactcatgcatttgttagttattcggagcgcgcaatttttaaactgtcctataacctctcctatatgaatagcacaagtgacattagtagggatagaatgttgagctaatttttgtaaataactatctataaaaagattatacaaagttttaaactctttagtttccgccatttatccagtctgagaaaatgtctctcataataaatttttccaagaaactaattgggtgaagaatggaaacctttaatctatatttatcacagtctgttttggtacacatgatgaattcttctaatgctgtactaaattcgatatctttttcgatttctggatatgtttttaataaagtatgaacaaagaaatggaaatcgtaataccagttatgttcaactttgaaattgttttttattttcttgttaatgattccagccacttgggaaaagtcaaagtcgtttaatgccgatttaatacgttcattaaaaacaaactttttatcctttagatgaattattattggttcattggaatcaaaaagtaagatattatcgggtttaagatctgcgtgtaaaaagttgtcgcaacagggtagttcgtagattttaatgtataacagagccatctgtaaaaagataaactttatgtattgtaccaaagatttaaatcctaatttgatagctaactcggtatctactttatctgccgaatacagtgctaggggaaaaattataatatttcctctttcgtattcgtagttagttctcttttcatgttcgaaaaagtgaaacatgcggttaaaatagtttataacattaatattactgttaataactgccggataaaagtgggatagtaatttcacgaatttgatactgtcctttctctcgttaaacgcctttaaaaaaactttagaagaatatctcaatgagagttcctgaccatccatagtttgtatcaataatagcaacatatgaagaacccgtttatacagagtatgtaaaaatgttaatttatagtttaatcccatggcccacgcacacacgattaattttttttcatctccctttagattgttgtatagaaatttgggtactgtgaactccgccgtagtttccatgggactatataattttgtggcctcgaatacaaattttactacatagttatctatcttaaagactataccatatcctcctgtagatatgtgataaaaatcgtcgtttataggataaaatcgtttatccttttgttggaaaaaggatgaattaatgtaatcattctcttctatctttagtagtgtttccttattaaaattcttaaaataatttaacaatctaactgacggagcccaattttggtgtaaatctaattgggacattatgttgttaaaatacaaacagtctcctaatataacagtatctgataatctatggggagacatccattgatattcaggggatgaatcattggcaacacccatttattgtacaaaaagccccaatttacaaacgaaagtccaggtttgatagagacaaacaattaactattttgtctctgtttttaatttctttggtaatgaaattattcacaatatcagtatcttctttatctaccagagattttactaacttgataaccttggctgtctcattcaatagggtagtaatatttgtatgtgtgatattgatatctttttgaattgtttcttttagaagtgattctttgatggtgccagcatacgaattacaataatgcagaaactcagttaacatgcaggaattatagtaagccaattccaattgttgcctgtattgtattagagtattaatatgcgcaatggtgtccttgcgtttctctgatagaatgcgagcagcgattttggcgttatcatttgacgatatttctggaatgacgaatcctgtttctactaactttttggtaggacaaagtgaaacaatcaagaagatagcttctcctcctatttgtggaagaaattgaactcctctagatgatctactgacgatagtatctccttgacagatattggaccgaattacagaagtacctggaatgtaaagccctgaaaccccctcattttttaagcagattgttgccgtaaatcctgcactgtgaccaagatagagagctcctttggtgaatccatctctatgtttcagtttaaccaagaaacagtcagctggtctaaaatttccatctctatctaatacagcatctaacttgatgtcaggaactatgaccggtttaatgttatatgtaacattgagtaaatccttaagttcataatcatcactgtcatcagttatgtacgatccaaacaatgtttctactggcatagtggatacgaagatgctatccatcagaatgtttccctgattagtattttctatatagctattcttctttaaacgattttccaaatcagtaactatgttcatttttttaggagtaggacgcctagccagtatggaagaggattttctagatcctctcttcaacatctttgatctcgatggaatgcaaaaccccatagtgaaacaaccaacgataaaaataatattgtttttcactttttataattttaccatctgactcatggattcattaatatctttataagagctactaacgtataattctttataactgaactgagatatatacaccggatctatggtttccataattgagtaaatgaatgctcggcaataactaatggcaaatgtatagaacaacgaaattatactagagttgttaaagttaatattttctatgagctgttccaataaattatttgttgtaactgcgttcaagtcataaatcatcttgatactatccagtaaaccgtgtttaagttctggaatattatcatcccattgtaaagcccctaattcgactatcgaatatcctgctctgatagcagtttcaatatcgacggacgtcaatactgtaataaaggtggtagtattgtcatcatcgtgataaactacgggaatatggtcgttagtaggtacggtgactttacacaacgcgatatataactttccttttgtaccatttttaacgtagttgggacgtcctgcagggtattgttttgaagaaatgatatcgagaacagatttgatacgatatttgttggattcctgattattcactataatataatctagacagatagatgattcgataaatagagaaggtatatcgttggtaggataatacatccccattccagtattctcggatactctattgatgacactagttaagaacatgtcttctattctagaaaacgaaaacatcctacatggactcattaaaacttctaacgctcctgattgtgtctcgaatgcctcgtacaaggatttcaaggatgccatagattctttgaccaacgatttagaattgcgtttagcatctgatttttttattaaatcgaatggtcggctctctggtttgctaccccaatgataacaatagtcttgtaaagataaaccgcaagaaaatttatacgcatccatccaaataaccctagcaccatcggatgatattaatgtattattatagattttccatccacaattattgggccagtatactgttagcaacggtatatcgaatagattactcatgtaacctactagaatgatagttcgtgtactagtcataatatctttaatccaatctaagaaatttaaaattagattttttacactgttaaagttaacaaaggtattacccggatacgtggatatcatatatggcattggtccattatcagtaatagctccataaactgatacggcgatggtttttatatgtgtttgatctaacgaggaagaaattcgcgcccacaattcatctctagatatgtatttaatatcaaacggtaacacatcaatttcgggacgcgtatatgtttctaaatttttaatccaaatataatgatgacctatatgccctattatcatactgtcaactatagtacacctagagaacttacgatacatctgtttcctataatcgttaaattttacaaatctataacatgctaaaccttttgacgacagccattcattaatttctgatatggaatctgtattctcgataccgtattgttctaaagccagtgctatatctccctgttcgtgggaacgctttcgtataatatcgatcaacggataatctgaagtttttggagaataatatgactcatgatctatttcgtccataaacaatctagacataggaattggaggcgatgatcttaattttgtgcaatgagtcgtcaatcctataacttctaatcttgtaatattcatcatcgacataatactatctatgttatcatcgtatattagtataccacggccttcttcatttcgtgccaaaataatatacagtcttaaataattacgcaatatctcaatagtttcataattgttagctgttttcatcaagatttgtaccctgtttaacatgatggcgttctatacgtctctattttcttttttttaaatttttaacgatttactgtggctagatacccaatctctctcaaatatttttttagcctcgcttacaagctgtttatctatactattaaaactgacgaatccgtgattttggtaatgggttccgtcgaaatttgccgaagtgatatgaacatattcgtcgtcgactatcaacaattttgtattattctgaatagtgaaaaccttcacagatagatcattttgaacacacaacgcgtctagacttctggcggttgccatagaatatacgtcgttcttatcccaattaccaactagaagtctgatcttaactcctctattaatggctgcttctataatggagttgtaaatgtcgggccaatagtagctattaccgtcgacacgtgtagtgggaactatggccaaatgttcaatatctatactagtcttagccgacttgagtttatcaataactacatcggtatctagatctctagaatatcccaataggtgttccggagaatcagtaaagaacactccacctataggattcttaatatgatacgcagtgctaactggcaaacaacaagccgcagagcataaattcaaccatgaattttttgcgctattaaaggctttaaaagtatcaaatcttctacgaagatctgtggccagcgggggataatcagaatatacacctaacgttttaatcgtatgtatagatcctccagtaaatgacgcgtttcctacataacatctttcatcatctgacacccaaaaacaaccgagtagtagtcccacattattttttttatctatattaacggttataaaatttatatccgggcagtgactttgtagctctcccagatttcttttccctcgttcatctagcaaaactattattttaatccctttttcagatgcctcttttagtttatcaaaaataagcgctcccctagtcgtactcagaggattacaacaaaaagatgctatgtatatatatttcttagctagagtgataatttcgttaaaacattcaaatgttgttaaatgatcggatctaaaatccatattttctggtagtgtttctaccagcctacattttgctcccgcaggtaccgatgcaaatggccacatttagttaacataaaaacttatacatcctgttctatcaacgattctagaatatcatcggctatatcgctaaaattttcatcaaagtcgacatcacaacctaactcagtcaatatattaagaagttccatgatgtcatcttcgtctatttctatatccgtatccattgtagattgttgaccgattatcgagtttaaatcattactaatactcaatccttcagaatacaatctgtgtttcattgtaaatttataggcggtgtatttaagttggtagattttcaattatgtatcaatatagcaacagtagttcttgctcctccttgattctagcatcctcttcattattttcttctacgtacataagcatgtccaatacgttagacaacacaccgacgatggcggccgccacagacacgaatatgactagaccgatgaccatttaaaaacccctctctagctttcacttaaactgtatcgattattcttttagaacatgtataatataaaaacattattctatttcgaatttaggcttccaaaaatttttcatccgtaaaccgataataatatatatagacttgttaatagtcggaataaatagattaatgcttaaactatcatcatctccacgattagagatacaatatttacattttttttgctgtttcgaaactttatcaatacacgttaatacaaacccaggaaggagatattgaaactgaggctgttgaaaatgaaacggtgaatacaataattcagataatgtaaaatcatgattccgtattctgatgatattagaactgctaatggatgtcgatggtatgtatctaggagtatctattttaacaaagcatcgatttgctaatatacaattatccttttgattaattgttattttattcatattcttaaaaggtttcatatttatcaattcttctacattaaaaatttccatttttaatttatgtagcccccgcaatactcctcattacgtttcattttttgtctataatatccattttgttcatctcggtacatagattatccaattgagaagcgcatttagtagttttgtacattttaagtttattgacgaatcgtcgaaaactagttatagttaacattttattatttgataccctgatattaatacccctgccgttactattatttataactgatgtaatccacgtaacattagaattaattatcgatagtaatgcatcgacgcttccaaaattgtctattataaactcaccgataatttttttattgcatgttttcatattcattaggattatcaaatctttaatcttactacgattgtatgcgttgatattgcaagacgtcattctaaaagacggaggatctccatcaaatgccagacaatcacgtacaaagtacatggaaataggttttgttctattgcgcatcatagatttatatagaacacccgtagaaatactaatttgttttactctataaaatactaatgcatctatttcatcgttttgtataacgtctttccaagtgtcaaattccaaatttttttcattgatagtaccaaattcttctatctctttaactacttgcatagataggtaattacagtgatgcctacatgccgttttttgaaactgaatagatgcgtctagaagcgatgctacgctagtcacaatcaccactttcatatttagaatatatgtatgtaaaaatatagtagaatttcattttgtttttttctatgctataaatgaattctcattttgcatctgctcatactccgttttatatcaataccaaagaaggaagatatctggttctaaaagccgttaaagtatgcgatgttagaactgtagaatgcgaaggaagtaaagcttcctgcgtactcaaagtagataaaccctcatcgcccgcgtgtgagagaagaccttcgtccccgtccagatgcgagagaatgaataaccctggaaaacaagttccgtttatgaggacggacatgctacaaaatatgttcgcggctaatcgcgacaacgtggcgtcgagacttttgaactaaaatacaattatatccttttcgatattaataaatccgtgtcgtccaggttttttatctctttcagtatgtgaatagataggtattttatctctattcatcatcgaatttaagagatccgataaacattgtttgtattctccagatgtcagcatctgatacaacaatatatgtgcacataaacctctggcacttatttcatgtaccttccccttatcactaaggagaatagtatttgagaaatatgtatacatgatattatcatgaattagatatacagaatttgtaacactctcgaaatcacacgatgtgtcggcgttaagatctaatatatcactcgataacacattttcatctagatacactagacattttttaaagctaaaatagtctttagtagtgacagtaactatgcgattattttcatcgatgatacatttcatcggcatattattacgcttaccatcaaagactataccatgtgtatatctaacgtattctagcatggttgccatacgcgcattaaacttttcaggatctttggatagatcttccaatctatctatttgagaaaacatttttatcatgttcaatagttgaaacgtcggatccactatatagatattatctataaagattttaggaactacgttcatggtatcctggcgaatattaaaactatcaatgatatgattatcgttttcatcttttatcaccatatagtttctaagatatgggattttacttaatataatattatttcccgtgataaattttattagaaaggccaaatctataagaaaagttctagaattagtctgaagaatatctatatcgccgtaccgtatatttggattaattagatatagagaatatgatccgtaacatatacaacttttattatggcgtctaagatattcttccatcaacttattaacatttttgactagggaagatacattatgacgtcccattacttttgccttgtctattactgcgacgttcatagaatttagcatatctcttgccaattcttccattgatgttacattataagaaattttagatgaaattacatttggagctttaatagtaagaactcctaatatgtccgtgtatgtggtcactaatacagattgtagttctataatcgtaaataatttacctatattatatgtttgagtctgtttagaaaagtagctaagtatacgatcttttatttctgatgcagatgtattaacatcggaaaaaaatctttttttattcttttttactaaagatacaaatatgtctttgttaaaaacagttattttttgaatatttctagcttgtaattttaacatatgatattcgttcacactaggtactctgcctaaataggtttctataatctttaatgtaatattaggaagagtattctgatcaggattcctattcattttgaggatttaaaactctgattattgtctaatatggtctctacgcaaactttttcacagagcgatagagtttttgataactcgtttttcttaagaaatataaaactactgtctccagagctcgctctatcttttattttatttaattcgatacaaactcctgatactggttcagaaagtaattcattaattttcagtcctttatagaagatatttaatatagataatacaaaattttcagttcttgatatcgatctgattgatcctagaactagatatattaataacgtgctcattaggcagtttatggcagcttgataattagatatagtatattccagttcatatttattagataccgcattgcccagattttgatattctatgaattcctctgaaaataaatccaaaataactaaacattctattttttgtggattagtgtactctcttccctctatcatgttcactactggtgtccacgatgataaatatctagagggaatataatatagtccataggatgccaatctagcaatgtcgaataactgtaatttgattcttcgttcttcattatgaattgattcttgaggtataaacctaacacaaattatattattagacttttcgtatgtaatgtctttcatgttataagtttttaatcctggaatagaatctattttaatgaggcttttaaacgcagagttctccaacgagtcaaagcataatactctgttgtttttcttatatacgatgttacgattttcttctttgaatggaataggtttttgaattagtttataattacaacataatagataaggaagtgtgcaaatagtacgcggaaaaaacataatagctcccctgttttcatccatggttttaagtaaatgatcactggcttctttagtcaatggatattcgaacattaaccgtttcatcatcattggacagaatccatatttcttaatgtaaagagtgatcaaatcattgtgtttattgtaccatcttgttgtaaatgtgtattcggttatcggatctgctcctttttctattaaagtatcgatgtcgatctcgtctaagaattcaactatatcgacatatttcatttgtatacacataaccattactaacgtagaatgtataggaagagatgtaacgggaacagggtttgttgattcgcaaactattctaatacataattcttctgttaatacgtcttgcacgtaatctattatagatgccaagatatctatataattattttgtaagatgatgttaactatgtgatctatataagtagtgtaataattcatgtatttcgatatatgttccaactctgtctttgtgatgtctagtttcgtaatatctatagcatcctcaaaaaatatattcgcatatattcccaagtcttcagttctatcttctaaaaaatcttcaacgtatggaatataataatctattttacctcttctgatatcattaatgatatagtttttgacactatcttctgtcaattgattcttattcactatatctaagaaacggatagcgtccctaggacgaactactgccattaatatctctattatagcttctggacataattcatctattataccagaattaatgggaactattccgtatctatctaacatagttttaagaaagtcagaatctaagacctgatgttcatatattggttcatacatgaaatgatctctattgatgatagtgactatttcattctctgaaaattggtaactcattctatatatgctttccttgttgatgaaggatagaatatactcaatagaatttgtaccaacaaactgttctcttatgaatcgtatatcatcatctgaaataatcatgtaaggcatacatttaacaattagagacttgtctcctgttatcaatatactattcttgtgataatttatgtgtgaggcaaatttgtccacgttctttaattttgttatagtagatatcaaatccaatggagctacagttcttggcttaaacagatatagtttttctggaacgaattctacaacattattataaaggactttgggtagataagtgggatgaaatcctattttaattaatgcgatagccttgtcctcgtgcagatatccaaacgcttttgtgatagtatggcattcattgtctagaaacgctctacgaatatctgtgacagatatcatctttagagaatatactagtcgcgttaatagtactacaatttgtattttttaatctatctcaataaaaaaattaatatgtatgattcaatgtataactaaactactaactgttattgataactagaatcagaatctaatgatgacgtaaccaagaagtttatctactgccaatttagctgcattatttttagcatctcgtttagattttccatctgccttatcgaatactcttccgtcgatgtctacacaggcataaaatgtaggagagttactaggccccactgattcaatacgaaaagaccaatctctcctagtaatttggcagtactcattaataacggtgacagggttagcacctttccaatcaataatttttttagccggaataacatcatcaaaagacttatgatcctctctcattgatttttcgcgggatacatcatctattatgacgtcagccatagcatcagcatccggcttatccgcctccgttgtcataaaccaacgaggaggaatatcgtcggagctgtacaccatagcactacgttgaagatcgtacagagctttattaacttctcgcttctccatattaagttgtctagttagttgtgcagcagtagctccttcgattccaatggttttaatagcctcacacacaatctctgcgttagaacgctcgtcgatatagattttagacatttttagagagaactaacgcaatcagtaataaaactaatttattttatcattttttttattcatcatcctctggtggttcgtcgtttctatcgaatgtagctctgattaacccgtcatctataggtgatgctggttctggagattctggaggagatggattattatctggaagaatctctgttatttccttgttttcatgtatcgattgcgttgtaacattaagattgcgaaatgctctaaatttgggaggcttaaagtgttgtttgcaatctctacacgcgtgtctaactagtggaggttcgtcagcggctctagtttgaatcatcatcggcgtagtattcctacttttacagttaggacacggtgtattgtatttctcgtcgagaacgttaaaataatcgttgtaactcacatcctttattttatctatattgtattctactcctttcttaatgcattttataccgaataagagatagcgaaggaattctttttcggtgccgctagtacccttaatcatatcacatagtgttttatattccaaatttgtggcaatagacggtttatttctatacgatagtttgtttctggaatcctttgagtattctataccaatattattctttgattcgaatttagtttcttcgatattagattttgtattacctatattcttgatgtagtactttgatgatttttccatggcccattctattaagtcttccaagttggcatcatccacatattgtgatagtaattctcggatatcagtagcggttaccgccattgatgtttgttcattggatgagtaactactaatgtatacattttccatttataacacttatgtattaactttgttcatttatattttttcattattatgttgatattaacaaaagtgaatatatatatgttaataattgtattgtggttatacggctacaattttataattagtgaaagtcagtgtccgatgatcaatgacgatagctttactctgaaaagaaagtatcaaatcgatagtgcggagtcaacaataaaaatggataagaagaggacaaagtttcagaatagagccaaaatggtaaaagaaataaatcagacaataagagcagcacaaactcattacgagacattgaaactaggatacataaaatttaagagaatgattaggactactactctagaagatatagcaccatctattccaaataatcagaaaacttataaactattctcggacatttcagccatcggcaaagcatcacggaatccaagtaagatggtatatgctctgctgctttacatgtttcccaatttgtttggagatgatcatagattcattcgttatagaatgcatccaatgagtaaaatcaaacacaagatcttctctcctttcaaacttaatcttattagaatattagtggaagaaagattctataataatgaatgcagatctaataaatggagaataattggaacacaagttgataaaatgttgatagctgaatctgataaatatacaatagatgcaaggtataacctaaaacccatgtatagaatcaagggaaaatctgaagaagataccctctttatcaaacagatggtagaacaatgtgtgacatcccaggaattggtggaaaaagtgttgaagatactgtttagagatttgttcaagagtggagaatacaaagcgtacagatacgatgatgatgtagaaaatggatttattggattggatacactaaaattaaacattgttcatgatatagttgaaccatgtatgcctgttcgtaggccagtggctaagatactgtgtaaagaaatggtaaataaatactttgagaatccgctacatattattggtaaaaatcttcaagagtgcattgactttgttagtgaataggcatttcatctttctccaatactaattcaaattgttaaattaataatggatagtataaatagttattagtgataaaatagtaaaaataattattagaataagagtgtagtatcatagataactctcttctataaaaatggattttattcgtagaaagtatcttatatacacagtagaaaataatatagattttttaaaggatgatacattaagtaaagtaaacaattttaccctcaatcatgtactagctctcaagtatctagttagcaattttcctcaacatgttattactaaggatgtattagctaataccaatttttttgttttcatacatatggtacgatgttgtaaagtgtacgaagcggttttacgacacgcatttgatgcacccacgttgtacgttaaagcattgactaagaattatttatcgtttagtaacacaatacaatcgtacaaggaaaccgtgcataaactaacacaagatgaaaaatttttagaggttgccaaatacatggacgaattaggagaacttataggcgtaaattatgacttagttcttaatccattatttcacggaggggaacccatcaaagatatggaaatcatttttttaaaactgtttaagaaaacagacttcaaagttgttaaaaaattaagtgttataagattacttatttgggcttacctaagcaagaaagatacaggcatagagtttgcggataatgatagacaagatatatatactctatttcaacaaactggtagaatcgtccatagcaatctaacagaaacgtttagagattatatctttcccggagataagactagctattgggtgtggttaaacgaaagtatagctaatgatgcggatattgttcttaatagacacgccattaccatgtatgataaaattcttagttatatatactctgagataaaacaaggacgcgttaataaaaacatgcttaagttagtttatatctttgagcctgaaaaagatatcagagaacttctgctagaaatcatatatgatattcctggagatatcctatctattattgatgcaaaaaacgacgattggaaaaaatattttattagtttttataaagctaattttattaacggtaatacatttattagtgatagaacgtttaacgaggacttattcagagttgttgttcaaatagatcccgaatatttcgataatgaacgaattatgtctttattctctacgagtgctgcggacattaaacgatttgatgagttagatattaataacagttatatatctaatataatttatgaggtgaacgatatcacattagatacaatggatgatatgaagaagtgtcaaatctttaacgaggatacgtcgtattatgttaaggaatacaatacatacctgtttttgcacgagtcggatcccatggtcatagagaacggaatactaaagaaactgtcatctataaaatccaagagtagacggctgaacttgtttagcaaaaacattttaaaatattatttagacggacaattggctcgtctaggtcttgtgttagatgattataaaggagacttgttagttaaaatgataaaccatcttaagtctgtggaggatgtatccgcattcgttcgattttctacagataaaaaccctagtattcttccatcgctaatcaaaactattttagctagttataatatttccatcatcgtcttatttcaaaggtttttaagagataatctatatcatgtagaagaattcttggataaaagcatccatctaaccaagacggataagaaatatatacttcaattgataagacacggtagatcatagaacagaccaaatatattattaataatttgtatatacatagatataattatcacatattaaaaattcacacatttttgataaatgggaactgctgcaacaattcagactcccaccaaattaatgaataaagaaaatgcagaaatgattttggaaaaaattgttgatcatatagttatgtatattagtgacgaatcaagtgattcagaaaataatcctgaatatattgattttcgtaacagatacgaagactatagatctctcattataaaaagtgatcacgagtttgtaaagctatgtaaaaatcatgcagagaaaagttctccagaaacgcaacaaatgattatcaaacacatatacgaacaatatcttattccagtatctgaagtactattaaaacctataatgtccatgggtgacataattacatataacggatgtaaagacaatgaatggatgctagaacaactctctaccctaaactttaacaatctccgcacatggaactcatgtagcataggcaatgtaacgcgtctgttttatacattttttagttatctgatgaaagataaactaaatatataagtataatcccattctaatactttaacctgatgtattagcatcttattagaatattaacctaactaaaagacataacataaaaactcattacatagttgataaaaagcggtaggatataaatattatggctgccaccgttccgcgttttgacgacgtgtacaaaaatgcacaaagaagaattctagatcaagaaacattttttagtagaggtctaagtagaccgttaatgaaaaacacatatctatttgataattacgcgtatggatggataccagaaactgcaatttggagtagtagatacgcaaacttagatgcaagtgactattatcccatttcgttgggattacttaaaaagttcgagtttctcatgtctctatataaaggtcctattccagtatacgaagaaaaagtaaatactgaattcattgctaatggatcgttctctggtagatacgtatcatatcttcgaaagttttctgctcttccaacaaacgagtttattagttttttgttactgacttccattccaatctataatatcttgttctggtttaaaaatactcagtttgatattactaaacacacattattcagatacgtctatacagataatgccaaacacctggcgttggctaggtatatgcatcaaacaggagactataagcctttgtttagtcgtctcaaagagaattatatatttaccggtcccgttccaataggtatcaaagatataaatcaccctaatcttagtagagcaagaagtccatccgattatgagacattagctaatattagtactatattgtactttaccaagtatgatccggtattaatgtttttattgttttacgtacctgggtattcaattactacaaaaattactccagccgtagaatatctaatggataaactgaatctaacaaagagcgacgtacaactgttgtaaattattttatgcttcgtaaaatgtaggttttgaaccaaacattctttcaaagaatgagatgcataaaactttattatccaatagattgactatttcggacgtcaatcgtttaaagtaaacttcgtaaaatattctttgatcactgccgagtttaaaacttctatcgataattgtttcatatgttttaatatttacaagttttttggtccatggtacattagccggacaaatatatgcaaaataatatcgttctccaagttctatagtttctggattatttttattatattcagtaaccaaatacatattagggttatctgcggatttataatttgagtgatgcattcgactcaacataaataattctagaggagacgatctactatcaaattcggatcgtaaatctgtttctaaagaacggagaatatctatacatacctgattagaattcatccgtccttcagacaacatctcagacagtctggtcttgtatgtcttaatcatattcttatgaaacttggaaacatctcttctagtttcactagtacctttattaattctctcaggtacagattttgaattcgacgatgccgagtatttcatcgttgtatatttcttcttcgattgcataatcagattcttatataccgcctcaaactctattttaaaattattaaacaatactctattattaatcagtcgttctaactcctttgctatttctatggacttatctacatcttgactgtctatctctgtaaacacggagtcggtatctccatacacgctacgaaaacgaaatctgtaatctataggcaacgatgttttcacaatcggattaatatctctatcgtccatataaaatggattacttaatggattggcaaaccgtaacataccgttagataactctgctccatttagtaccgattctagatacaagatcattctacgtcctatggatgtgcaactcttagccgaagcgtatgagtatagagcactatttctaaatcccatcagaccatatactgagttggctactatcttgtacgtatattgcatggaatcatagatggccttttcagttgaactggtagcctgttttaacatctttttatatctggctctctctgccaaaaatgttcttaatagtctaggaatggttccttctatcgatctatcgaaaattgctatttcagagatgaggttcggtagtctaggttcacaatgaaccgtaatatatctaggaggtggatatttctgaagcaagagctgattatttatttcttcttccaatctattggtactaacaacgacaccgactaatgtttccggagatagatttccaaagatacacacattaggatacagactgttataatcaaagattaatacattattactaaacattttttgttttggagcaaataccttaccgccttcataaggaaacttttgttttgtttctgatctaactaagatagttttagtttccaacaatagctttaacagtggacccttgatgactgtactcgctctatattcgaataccatggattgaggaagcacatatgttgacgcacccgcgtctgtttttgtttctactccataatactcccacaaatactgacacaaacaagcatcatgaatacagtatctagccatatctaaagctatgtttagattataatccttatacatctgagctaaatcaacgtcatcctttccgaaagataatttatatgtatcattaggtaaagtaggacataatagtacgactttaaatccattttcccaaatatctttacgaattactttacatataatatcctcatcaacagtcacataattacctgtggttaaaacctttgcaaatgcagcggctttgcctttcgcgtccgtagtatcgtcaccgatgaacgtcatttctctaactcctctatttaatactttacccatgcaactgaacgcgttcttggatatagaatccaatttgtacgaatccaatttttcagatttttgaatgaatgaatatagatcgaaaaatatagttccattattgttattaacgtgaaacgtagtattggccatgccgcctactcccttatgactagactgatttctctcataaatacagagatgtacagcttcctttttgtccggagatctaaagataatcttctctcctgttaataactctagacgattagtaatatatctcagatcaaagttatgtccgttaaaggtaacgacatagtcgaacgttagttccaacaattgtttagctattcgtaacaaaactatttcagaacataaaactagttctcgttcgtaatccatttccattagtgactgtatcctcaaacatcctctatcgacggcttcttgtatttcctgttccgttaacatctcttcattaatgagcgtaaacaataatcgtttaccacttaaatcgatataacagtaacttgtatgcgagattgggttaataaatacagaaggaaacttcttatcgaagtgacactctatatctagaaataagtacgatcttgggatatcgaatctaggtatttttttagcgaaacagttacgtggatcgtcacaatgataacatccattgttaatctttgtcaaatattgctcgtccaacgagtaacatccgtctggagatatcccgttagaaatataaaaccaactaatattgagaaattcatccatggtggcattttgtatgctgcgtttctttggctcttctatcaaccacatatctgcgacggagcattttctatctttaatatctagattataacttattgtctcgtcaatgtctatagttctcatctttcccaacggcctcgcattaaatggaggaggagacaatgactgatatatttcgtccgtcactacgtaataaaagtaatgaggaaatcgtataaatacggtctcaccatttcgacatctggatttcagatataaaaatctgttttcaccgtgactttcaaaccaattaatgcaccgaacatccatttatagaatttagaaatatattttcatttaaatgaatcccaaacattggggaagagccgtatggaccattatttttatagtactttcgcaagcgggtttagacggcaacatagaagcgtgtaaacgaaaactatatactatagttagcactcttccatgtcctgcatgtagacggcacgcgactatcgctatagaggacaataatgtcatgtctagcgatgatctgaattatatttattattttttcatcagattatttaacaatttggcatctgatcccaaatacgcgatcgatgtgacaaaggttaaccctttataaacttaacccattataaaacttatgattagtcacgactgaaataaccgcgtgattattttttggtataattctacacggcatggtttctgtgactatgaattcaacccccgttacattagtgaaatctttaacaaacagcaagggttcgtcaaagacataaaactcattgtttacaatcgaaatagaccccctatcacacttaaaataaaaaatatccttatcctttaccaccaaataaaattctgattggtcaatgtgaatgtattcacttaacagttccacaaatttatttattaactccgaggcacatacatcgtcggtattttttatggcaaactttactcttccagcatccgtttctaaaaaaatattaacgagttccatttatatcatccaatattattgaaatgacgttgatggacaaatgatacaaataagaaggtacggtacctttgtccaccatctcctccaattcatgctctattttgtcattaactttaatgtatgaaaacagtacgccacatgcttccatgacagtgtgtaacactttggatacaaaatgtttgacattagtataattgttcaagactgtcaatctataatagatagtagctataatatattctatgatggtattgaagaagatgacaaccttggcatattgatcatttaacacagacatggtatcaacagatagcttgaatgaaagagaatcagtaattggaataagcgtcttctcgatggagtgtccgtataccaacatgtctgatattttgatgtattccattaaattatttagttttttctttttattctcgttaaacagcatttctgtcaacggaccccaacatcgttgaccgattaagttttgattgatttttccgtgtaaggcgtatctagtcagatcgtatagcctatccaataatccatcgtctgtgtgtagatcacatcgtacactttttaattctctatagaagagcgacagacatctggagcaattacagacagcaatttctttattctctacagatgtaagatacttgaagacattcctatgatgatgcagaattttggataacacggtattgatggtatctgttaccataattcctttgatggctgatagtgtcagagcacaagatttccaatctttgacaatttttagcaccattatctttgttttgatatctatatcagacagcatggtgcgtctgacaacacaaggattaagacggaaagatgaaatgattctctcaacatcttcaatggataccttgctattttttctggcattatctatatgtgcgagaatatcctctagagaatcagtatcctttttgatgatagtggatctcaatgacatgggacgtctaaaccttcttattctatcaccagattgcatggtgatttgtcttctttcttttatcataatgtaatctctaaattcatcggcaaattgtctatatctaaaatcataatatgagatgtttacctctacaaatatctgttcgtccaatgttagagtatttacatcagttttgtattccaaattaaacatggcaacggatttaattttatattcctctattaagtcctcgtcgataataacagaatgtagataatcatttaatccatcgtacatggttggaagatgctcgttgacaaaatctttaattgtcttgatgaaggtgggactatatctaacatcttgattaataaaatttataacattgtccataggatactttgtaactagttttatacacatctcttcatcggtaagtttagacagaatatcgtgaacaggtggtatattatattcatcagatatacgaagaacaatgtccaaatctatattgtttaatatattatatagatgtagtgtagctcctacaggaatatctttaactaagtcaatgatttcatcaaccgttagatctattttaaagttaatcatataggcattgatttttaaaaggtatgtagccttgactacattctcattaattaaccattccaagtcactgtgtgtaagaagattatattctatcataagcttgactacatttggtcccgataccattaaagaattcttatgatataaggaaacagattttaggtactcatctactctacaagaattttggagagccttaacgatatcagtgacgtttattatttcaggaggaaaaaacctaacattgagaatatcggaattaatagcttccagatacagtgattttggcaatagtccgtgtaatccataatccagtaacacgagctggtgcttgctagacaccttttcaatgtttaatttttttgaaataagctttgataaagccttcctcgcaaattccggatacatgaacatgtcggcgacatgattaagtattgttttttcattatttttatattttctcaacaagttctcaataccccaatagatgatagaatatcacccaatgcgtccatgttgtctatttccaacaggtcgctatatccaccaatagaagttttcccaaaaaagattctaggaacagttctaccaccagtaatttgttcaaaatagtcacgcaattcattttcgggtttaaattctttaatatcgacaatttcatacgctcctcttttgaaactaaacttatttagaatatccagtgcatttctacaaaaaggacatgtatacttgacaaaaattgtcactttgttattggccaacctttgttgtacaaattcctcggccattttaatatttaagtgatataaaactatctcgacttatttaactctttagtcgagatatatggacgcagatagctatatgatagccaactacagaaggcaaacgctataaaaaacataattacgacgagcatatttataaatatttttattcagcattacttgatatagtaatattaggcacagtcaaacattcaaccactctcgatacattaactctctcattttctttaacaaattctgcaatatcttcgtaaaaagattcttgaaactttttagaatatctatcgactctagatgaaatagcgttcgtcaacatactatgttttgtatacataaaggcgcccattttaacagtttctagtgacaaaatgctagcgatcctaggatcctttagaatcacatagattgacgattcgtctctcttagtaactctagtaaaataatcatacaatctagtacgcgaaataatattatccttgacttgaggagatctaaacaatctagttttgagaacatcgataagttcatcgggaatgacatacatactatctttaatagaactcttttcatccagttgaatggattcgtccttaaccaactgattaatgagatcttctattttatcattttccagatgatatgtatgtccattaaagttaaattgtgtagcgcttctttttagtctagcagccaatactttaacatcactaatatcgatatacaaaggagatgatttatctatggtattaagaattcgtttttcgacatctgtcaaaaccaattcctttttgcctgtatcatccagttttccatcctttgtaaagaaattattttctactagactattaataagactgataaggattcctccataattgcacaatccaaactttttcacaaaactagactttacaagatctacaggaatgcgtacttcaggtttcttagcttgtgattttttcttttgtggacattttcttgtgaccaactcatctaccatttcattgattttagcagtgaaataagctttcaatgcacgggcactgatactattgaaaacgagttgatcttcaaattccgccatttaagttcaccaaacaacttttaaatacaaatatatcaatagtagtagaataagaactataaaaaaaataataattaaccaataccaaccccaacaaccggtattattagttgatgtgactgttttctcatcacttagaacagatttaacaatttctataaagtctgtcaaatcatcttccggagaccccataaatacaccaaatatagcggcgtacaacttatccatttatacattgaatattggcttttctttatcgctatcttcatcatattcatcatcaatatcaacaagtcccagattacgagccagatcttcttctacattttcagtcattgatacacgttcactatctccagagagtccgataacgttagccaccacttctctatcaatgattagtttcttgagtgcgaatgtaatttttgtttccgttccggatctatagaaaactacaggtgtgataattgccttggccaattgtctttctcttttactgagtgattctagttcaccttctatagatctgagaatggatgattctccagtcgaaacatattctaccatggctccgtttaatttgttgatgaagatggattcatccttaaatgttttctctgtaatagtttccaccgaaagactatgcaaagaatttggaatgcgttccttgtgcttaatgtttccatagacggcttctagaagttgatacaacataggactagccgcggtaacttttatttttagaaagtatccatcgcttctatcttgtttagatttatttttataaagtttagtctctccttccaacataataaaagtggaagtcatttgactagataaactatcagtaagttttatagagatagacgaacaattagcgtattgagaagcatttagtgtaacgtattcgatacattttgcattagatttactaatcgattttgcatactctataacacccgcacaagtctgtagagaatcgctagatgcagtaggtcttggtgaagtttcaactctcttcttgattaccttactcatgattaaacctaaataattgtactttgtaatataatgatatatattttcactttatctcatttgagaataaaaatgtttttgtttaaccactgcatgatgtacagatttcggaatcacaaaccaccggtggttttattttatccttgtccaatgtgaattgaatgggagcggatgcgggtttcgtacgtagatagtacattcccgtttttagaccgagactccatccgtaaaaatgcatactcgttagtttggaataactcggatctgctatatggatattcatagattgactttgatcgatgaaggctcccctgtctgcagccatttttatgatcgtcttttgtggaatttcccaaatagttttataaactcgcttaatatcttctggaaggtttgtattctgaatggatccaccatctgccataatcctattcttgatctcatcattccataattttctctcggttaaaactctaaggagatgcggattaactacttgaaattctccagacaatactctccgagtgtaaatattactggtatacggttccaccgactcattatttcccaaaatttgagcagttgatgcagtcggcataggtgccaccaataaactatttctaagaccgtatgttctgattttatcttttagaggttcccaattccaaagatccgacggtacaacattccaaagatcatattgtagaataccgttactggcgtacgatcctacatatgtatcgtatggtccttccttctcagctagttcacaactcgcctctaatgcaccgtaataaatggtttcgaagatcttcttatttagatcttgtgcttccaggctatcaaatggataatttaagagaataaacgcgtccgctaatccttgaacaccaataccgataggtctatgtctcttattagagatttcagcttctggaataggataataattaatatctataattttattgagatttctgacaattactttgaccacatccttcagtttgagaaaatcaaatcgcccatctattacaaacatgttcaaggcaacagatgccagattacaaacggctacctcattagcatccgcatattgtattatctcagtgcaaagattactacacttgatagttcctaaattttgttgattactctttttgttacacgcatccttataaagaatgaatggagtaccagtttcaatctgagattctataatcgctttccagacgactcgagcctttattatagatttgtatctcctttctctttcgtatagtgtatacaatcgttcgaactcgtctccccaaacattgtccaatccaggacattcatccggacacatcaacgaccactctccgtcatccttcactcgtttcataaagagatcaggaatccaaagagctataaatagatctctggttctatgttcctcgtttcctgtattctttttaagatcgaggaacgccataatatcagaatgccacggttccaagtatatggccataactccaggccgtttgtttcctccctgatctatgtatctagcggtgttattataaactctcaacattggaataataccgtttgatataccattggtaccggagatatagcttccactggcacgaatattactaattgatagacctattccccctgccattttagagattaatgcgcatcgttttaacgtgtcatagataccctctatgctatcatcgatcatgttaagtagaaaacagctagacatttggtgacgactagttcccgcattaaataaggtaggagaagcgtgcgtaaaccatttttcagaaagtagattgtacgtctcaatagctgagtctatatcccattgatgaattcctactgcgacacgcattaacatgtgctgaggtctttcaacgatcttgttgtttattttcaacaagtaggatttttccaaagttttaaaaccaaaatagttgtatgaaaagtctcgttcgtaaataataaccgagttgagtttatccttatatttgttaactatatccatggtgatacttgaaataatcggagaatgtttcccatttttaggattaacatagttgaataaatcctccatcacttcactaaatagtttttttgtttccttgtgtagatttgatacggctattctggcggctagaatggcataatccggatgttgtgtagtacaagtggctgctatttcggctgccagagtgtccaattctaccgttgttactccattatatattccttgaataaccttcatagctattttaataggatctatatgatccgtgtttaagccataacataattttctaatacgagacgtgattttatcaaacatgacattttccttgtatccatttcgtttaatgacaaacatttttgttggtgtaataaaaaaattatttaacttttcattaatagggatttgacgtacgtagcgtacaaaatgattgttcctggtatatagataaagagtcctatatatttgaaaatcgttacggctcgattaaactttaatgattgcatagtgaatatatcattaggatttaactccttgactatcagggcggcaccagaaattaccatcaaaagcattaatacagttatgcctatcgcagttagaacggttatagcatccaccatttatatctaaaaattagatcaaagaatatgtgacaaagtcctagttgtatattgagaattgacaaaacaatgtttcttacatattttttttttattagtaaccgacttaatagtaggaactggaaaactagacttgattattctataagtatagatacccttccaaataatattctctttgataaaagttccagaaaatgtagaattttttaaaaagttatcttttgctattaccaagattgtgtttagacgcttattattaatatgagtgatgaaatccacaccgcctctagatatcgcctttatttccacattagatggtaaatccaatagtgaaactatctttttaggaatgtatggactcgcgtttagaggagtgaacgtcttgggcgtcggaaaggatgattcgtcaaacgaataaacaatttcacaaatggatgttaatgtattagtaggaaattttttgacgctagtggaattgaaaattctaatggatgatgttctacctatttcatccgataacatgttaatttccgacaccaacggttttaatatttcgatgatatacggtagtctctctttcggacttatatagcttattccacaatacgagtcattatatactccaaaaaacaaaataactagtataaaatctgtatcgaatgggaaaaacgaaattatcgacataggtatagaatccggaacattgaacgtattaatacttaattctttttctgtggtaagtaccgataggttattgacattgtatggttttaaatattctataacttgagacttgatagatattagtgatgaattgaaaattatttttatcaccacgtgtgtttcaggatcatcgtcgacgcccgtcaaccaaccgaacggagtaaaataaatatcattaatatatgctctagatattagtatttttatcaatcctttgattatcatcttctcgtaggcgaatgattccatgatcaagagtgatttaagaacatcctccggagtattaatgggcttagtaaacagtccatcgttgcaataataaaagttatccaagttaaaggatattatgcattcgtttaaagatatcacctcatctgacggagacaattttttggtaggttttagagactttgaagctacttgtttaacaaagttattcatcgtcgtttactattctatttaattttgtagttaatttatcacatatcacattaattgactttttggtccatttttccatacgtttatattcttttaatcctgcgttatccgtttccgttatatccagtgatagatcgtgcaggttaaatagaatgctcttaaataatgtcatttttttatccgctaaaaatttaaagaatgtataaacttttttcaaagatttaaaacttttaggtggtgtcctagtacacaatatcataaacaaactaataaacatcccgcattcagattccaacagctgattaacttccacattaatacagcctattttcgctccaaatgtacattcgaaaaatctgaataaaacatcaatgtcgcaatttgtattatccaatacagaatgtttgtgattcgtgttaaaaccatcggagaaggaatagaaataaaaattattatagtggtggaattcagttggaatattgcctccggagtcataaaaggatactaaacattgttttttatcataaattacacatttccaatgagacaaataacaaaatccaaacattacaaatctagaggtagaacttttaattttgtctttaagtatatacgataagatatgtttattcataaacgcgtcaaatttttcatgaatcgctaaggagtttaagaatctcatgtcaaattgtcctatataatccacttcggatccataagcaaactgagagactaagttcttaatacttcgattgctcatccaggctcctctctcaggctctattttcatcttgacgacctttggattttcaccagtatgtattcctttacgtgataaatcatcgattttcaaatccatttgtgagaagtctatcgccttagatactttttcccgtagtcgaggtttaaagaaatacgctaacggtatactagtaggtaactcaaaaacatcatatatagaatggtaacgcgtctttaactcgtcggttaactctttcttttgatcgagttcgtcgctactattgggtctgctcaggtgccccgactctactagttccaacatcataccgataggaatacaagacactttgccggcggttgtagatttatcatatttttccactacatatccgttacaatttgttaaaaatttagatacatctatattgctacataatccagctagtgaatatatatgacataataaattggtaaatcctagttctggtattttactaattactaaatctgtatatctttccatttatcatggaaaagaatttaccagatatcttcttttttccaaactgcgttaatgtattctcttacaaatattcacaagatgaattcagtaatatgagtaaaacggaacgtgatagtttctcattggccgtgtttccagttataaaacatagatggcataacgcacacgttgtaaaacataaaggaatatacaaagttagtacagaagcacgtggaaaaaaagtatctcctccatcactaggaaaacccgcacacataaacctaaccgcgaagcaatatatatacagtgaacacacaataagctttgaatgttatagttttctaaaatgtataacaaatacagaaatcaattcgttcgatgagtatatattaagaggactattagaagctggtaatagtttacagatattttccaattccgtaggtaaacgaacagatactataggtgtactagggaataagtatccatttagcaaaattccattggcctcattaactcctaaagcacaacgagagatattttcagcgtggatttctcatagacctgtagttttaactggaggaactggagtgggtaagacgtcacaggtacccaagttattgctttggtttaattatttatttggtggattctctactctagataaaatcactaactttcacgaaagaccagtcattctatctcttcctaggatagctttagttagattgcatagcaataccattttaaaatcattgggatttaaggtactagatggatctcctatttctttacggtacggatctataccggaagaattaataaacaaacaaccaaaaaaatatggaattgtattttctacccataagttatctctaacaaaactatttagttatggcactcttattatagacgaagttcatgagcatgatcaaataggagatattattatagcagtagcgagaaagcatcatacgaaaatagattctatgtttttaatgactgccacgttagaggatgaccgagaacggctaaaagtatttttacctaatcccgcatttatacatattcctggagatacactgtttaaaattagcgaggtatttattcataataagataaatccatcttccagaatggcatacatagaagaagaaaagagaaatttagttactgctatacagatgtatactcctcctgatggatcatccggtatagtctttgtggcatccgttgcacagtgtcacgaatataaatcatatttagaaaaaagattaccgtatgatatgtatattattcatggtaaggtcttagatatagacgaaatattagaaaaagtgtattcatcacctaatgtatcgataattatttctactccttatttggaatccagcgttactatacgcaatgttacacacatttatgatatgggtaaagtttttgtccccgctccttttggaggatcgcaagaatttatttctaaatctatgagagatcaacgaaaaggaagagtaggaagagttaatcctggtacatacgtctatttctatgatctgtcttatatgaagtctatacagcgaatagattcagaatttctacataattatatattgtacgctaataagtttaatctaacactccccgaagatttgtttataatccctacaaatttggatattctatggcgtacaaaggaatatatagactcgttcgatattagtacagaaacatggaataaattattatccaattattatatgaagatgatagagtatgctaaactttatgtactaagtcctattctcgctgaggagttggataactttgagaggacgggagaattaactagtattgtacgagaagccattttatctctaaatttacgaattaagattttaaattttaaacataaagatgatgatacgtatatacacttttgtaaaatattattcggtgtctataacggaacaaacgctactatatattatcatagacctctaacgggatatatgaatatgatttcagatactatatttgttcctgtagataataactaaaaatcaaactctaatgaccacatctttttttagagatgaaaaattttctacatctccttttgtagacacgactaaacattttgcaaaaaaaagtttattagtgtttagataatcgtatacttcatcagtgtagatagtaaatgtgaacaaataaaaggtattcttactcaatagattggtaaattccatagaatatattaatcctttcttcttgagatcccacatcatttcaaccagagacgttttatccaatgatttacctcgtactataccacatacaaaactagattttgcagtgacgtcgtacctggtattcctaccaaacaaaattttacttttagttcttttagaaaattctaaggtagaatctctatttgccaatatgtcatctatggaattaccactagcaaaaaatgatagaaatatatattgatacatcgcagctggttttgatctactatactttaaaaacgaatcagattccataattgcctgtatatcatcagctgaaaaactatgttttacacgtattccttcggcatttctttttaatgatatatcttgtttagacaatgataaagttatcatgtccatgagagacgcgtctccgtatcgtataaatatttcattagatgttagacgcttcattaggggtatacttctataaggtttcttaatcagtccatcattggttgcgtcaagaactactatcggatgttgttgggtatctctagtgttacacatggccttactaaagtttgggtaaataactatgatatctctattaattatagatgcatatatttcattcgtcaaggatattagtatcgacttgctatcgtcattaatacgtgtaatgtaatcatataaatcatgcgatagccaaggaaaattcaaatagatgttcatcatataatcgtcgctataattcatattaatacgttgacattgactaatttgtaatatagcctcgccacgaagaaagctctcgtattcagtttcatcgataaaggataccgttaaatataactggttgccgatagtctcatagtctattaagtggtaagtttcgtacaaatacagaatccctaaaatattatctaatgttggattaatctttaccataactgtataaaatggagacggagtcataactattttaccgtttgtacttactggaatagacgaaggaataatctccggacatgctggtaaagacccaaatgtctgtttgaagaaatccaatgttccaggtcctaatctcttaacaaaaattacgatattcgatcccgatatcctttgcattctatttaccagcatatcacgaactatattaagattatctatcatgtctattctcccaccgttatataaatcgcctccgctaagaaacgttagtatatccatacaatggaatacttcatttctaaaatagtattcgttttctaattctttaatgtgaaatcgtatactagaaagggaaaaattatctttgagttttccgttagaaaagaaccacgaaactaatgttctgattgcgtccgattccgttgctgaattaatggatttacaccaaaaactcatataacttctagatgtagaagcattcgctaaaaaattagtagaatcaaaggatataagtagatgttccaacaagtgagcaattcccaagatttcatctatatcattctcgaatccgaaattagaaattcccaagtagatatcctttttcatccgatcgttgatgaaaatacgaactttattcggtaagacaatcatttactaaggagtaaaataggaagtaatgttcgtatgtcgttatcatcgtataaattaaaggtgtgttttttaccattaagtgacattataattttaccaatattggaattataatataggtgtatttgcgcactcgcgacggttgatgcatcggtaaatatagctgtatctaatgttctagtcggtatttcatcatttcgctgtctaataatagcgttttctctatctgtttccattacagctgcctgaagtttattggtcggataatatgtaaaataataagaaatacatacgaataacaaaaataaaataagatataataaagatgccatttagagatctaattttgttcaacttgtccaaattcctacttacagaagatgaggaatcgttggagatagtgtcttccttatgtagaggatttgaaatatcttatgatgacttgataacttactttccagataggaaataccataaatatatttctaaagtatttgaacatgtagatttatcggaggaattaagtatggaattccatgatacaactttgcgagatttagtctatcttagattgtacaagtattccaagtgtatacggccgtgttataaattaggagataatctaaaaggcatagttgttataaaggacaggaatatttatattagggaagcaaatgatgacttgatagaatatctcctcaaggaatacactcctcagatttatacatattctaatgagcgcgtccccataactggttcaaaattaattctttgtggattttctcaagttacatttatggcgtatacaacgtcgcatataacaacaaataaaaaggtagatgttctcgtttccaaaaaatgtatagatgaactagtcgatccaataaattatcaaatacttcaaaatttatttgataaaggaagcggaacaataaacaaaatactcaggaagatattttattcggtaacaggtggccaaactccataggtagctttttctatttcggattttagaatttccaaattcaccagcgatttatctgttttggtgaaatccaaggatttattaatgtccacaaatgccatttgttttgtctgtggattgtatttgaaaatggaaacgatgtagttagatagatgcgctgcgaagtttcctattagggttccgcgcttcacgtcacccagcatacttgaatcaccatcctttaaaaaaaatgataagatatcaacatggagtatatcatactcggattttaattcttctactgcatcactgacattttcacaaatactacaatacggtttaccgaaaataatcagtacgttcttcatttatgggtatcaaaaacttaaaatcgttactgctggaaaataaatcactgacgatattagatgataatttatacaaagtatacaatggaatatttgtggatacaatgagtatttatatagccgtcgccaattgtgtcagaaacttagaagagttaactacggtattcataaaatacgtaaacggatgggtaaaaaagggagggcatgtaaccctttttatcgatagaggaagtataaaaattaaacaagacgttagagacaagagacgtaaatattctaaattaaccaaggacagaaaaatgctagaattagaaaagtgtacatccgaaatacaaaatgttaccggatttatggaagaagaaataaaggcagaaatgcaattaaaaatcgataaactcacatttcaaatatatttatctgattctgataacataaaaatatcattgaatgagatactaacacatttcaacaataatgagaatgttacattattttattgtgatgaacgagacgcagaattcgttatgtgtctcgaggctaaaacacatttctctaccacaggagaatggccgttgataataagtaccgatcaggatactatgctatttgcatctgctgataatcatcctaagatgataaaaaacttaactcaactgtttaaatatgttccatctgcagaggataactatttagcaaaattaacggcgttagtgaatggatgtgatttctttcctggactctatggggcatctataacacccaacaacttaaacaaaatacaattgtttagtgattttacaatcgataatatagtcactagtttggcaattaaaaattattatagaaagactaactctaccgtagacgtgcgtaatattgttacgtttataaacgattacgctaatttagacgatgtctactcgtatattcctccttgtcaatgcactgttcaagaatttatattttccgcattagatgaaaaatggaatgaatttaaatcatcttatttagaaagcgtgccgttaccctgccaattaatgtatgcgttagaaccacgcaaggagattgatgtttcagaagttaaaactttatcatcttatatagatttcgaaaatactaaatcagatatcgatgttataaaatctatatcctcgatcttcggatattctaacgaaaactgtaacacgatagtattcggcatctataaggataatttactactgagtataaatagttcattttactttaacgatagtctgttaataaccaatactaaaagtgataatataataaatataggttactagattaaaaatggtgttccaactcgtgtgctctacgtgcggcaaagatatttctcacgaacgatataaattgattatacgaaaaaaatcattaaaggatgtactcgtcagtgtaaagaacgaatgttgtaggttaaaattatctacacaaatagaacctcaacgtaacttaacagtgcaacctctattggatataaactaatatggatccggttaattttatcaagacatatgcgcctagaggttctattatttttattaattataccatgtcattaacaagtcatttgaatccatcgatagaaaaacatgtgggtatttattatggtacgttattatcggaacacttggtagttgaatcaacatatagaaaaggagttcgaatagtcccattggatagtttttttgaaggatatcttagtgcaaaagtatacatgttagagaatattcaagttatgaaaatagcagctgatacgtcattaactttattgggtattccgtatggatttggtcatgatagaatgtattgttttaaattggtagctgactgttataaaaatgccggtattgatacatcgtctaaacgaatattaggtaaagatatttttctgagccaaaacttcacagacgataatagatggataaagatatatgattctaataatttaacattttggcaaattgattaccttaaagggtgagttaatatgcataactactcctccgttgttttttccctcgttctttttcttaacgttgtttgccatcactctcataatgtaaagatattctaaaatggtaaacttttgcatatcggacgcagaaattggtataaatgttgtaattgtattatttcccgtcaatggactagtcacagctccatcagttttatatcctttagagtatttctcactcgtgtctaacattctagagcattccatgatctgtttatcgttgatattggccggaaagatagattttttattttttattatattactattggcaattgtagatataacttctggtaaatatttttctaccttttcaatctcttctattttcaagccggctatatattctgctatattgttgctagtatcaataccttttctggctaagaagtcatatgtggtattcactatatcagttttaactggtagttccattagcctttccacttctgcagaataatcagaaattggttctttaccagaaaatccagctactataataggctcaccgatgatcattggcaaaatcctatattgtaccagattaatgagagcatatttcatttccaataattctgctagttcttgagacattgatttatttgatgaatctagttggttctctagatactctaccatttctgccgcatacaataacttgttagataaaatcagggttatcaaagtgtttagcgtggctagaatagtgggcttgcatgtattaaagaatgcggtagtatgagtaaaccgttttaacgaattatatagtctccagaaatctgtggcgttacatacatgagccgaatgacatcgaagattgtccaatatttttaatagctgctctttgtccattatttctatatttgactcgcaacaattgtagataccattaatcaccgattcctttttcgatgccggacaatagcacaattgtttagctttggactctatgtattcagaattaatagatatatctcttaatacagattgcactatacattttgaaactatgtcaaaaattgtagaacgacgctgttctgcagccatttaactttaaataatttacaaaaatttaaaatgagcatccgtataaaaatcgataaactgcgccaaattgtggcatatttttcagagttcagtgaagaagtatctataaatgtagactcgacggatgagttaatgtatatttttgccgccttgggcggatctgtaaacatttgggccattatacctctcagtgcatcagtgttctaccgcggagccgaaaatattgtgtttaatcttcctgtgtccaaggtaaaatcgtgtttgtgtagttttcacaatgatgccatcatagatatagaacctgatctggaaaataatctagtaaaactttctagttatcatgtagtaagtgtcgattgtaataaggaactgatgcctattaggacagatactactatttgtctaagtatagatcaaaagaaatcttacgtgtttaattttcacaagtatgaagaaaaatgttgtggtagaaccgtcattcatttagaatggttgttgggctttatcaagtgtattagtcagcatcagcatttggctattatgtttaaagatgacaatattattatgaagactcctggtaatactgatgcattttccagggaatattctatgactgaatgttctcaagaactacaaaagttttctttcaaaatagctatctcgtctctcaacaaactacgaggattcaaaaagagagtcaatgtttttgaaactagaatcgtaatggataatgacgataacattttaggaatgttgttttcggatagagttcaatcctttaagatcaacatctttatggcgtttttagattaatactttcaatgagataaatatgggtggcggagtaagtgttgagctccctaaacgggatccgcctccgggagtacccactgatgagatgttattaaacgtggataaaatgcatgacgtgatagctcccgctaagcttttagaatatgtgcatataggaccactagcaaaagataaagaggataaagtaaagaaaagatatccagagtttagattagtcaacacaggacccggtggtctttcggcattgttaagacaatcgtataatggaaccgcacccaattgctgtcgcacttttaatcgtactcattattggaagaaggatggaaagatatcagataagtatgaagagggtgcagtattagaatcgtgttggccagacgttcacgacaccggaaaatgcgatgttgatttattcgactggtgtcagggggatacgttcgatagaaacatatgccatcagtggatcggttcagcctttaataggagtaatagaactgtagagggtcaacaatcgttaataaatctgtataataagatgcaaacattatgtagtaaagatgctagtgtaccaatatgtgaatcatttttgcatcatttacgcgcacacaatacagaagatagcaaagagatgatcgattatattctaagacaacagtctgcggactttaaacagaaatatatgagatgtagttatcccactagagataagttagaagagtcattaaaatatgcggaacctcgagaatgttgggatccagagtgttcgaatgccaatgttaatttcttgctaacacgtaattataataatttaggactttgcaatattgtacgatgtaatactagcgtgaacaacttacagatggataaaacttcctcattaagattgtcatgtggattaagcaatagtgatagattttctactgttcccgtcaatagagcaaaagtagttcaacataatattaaacactcgttcgacctaaaattgcatttgatcagtttattatctctcttggtaatatggatactaattgtagctatttaaatgggtgccgcggcaagcatacagacgacggtgaatacactcagcgaacgtatctcgtctaaattagaacaagaagcgaatgctagtgctcaaacaaaatgtgatatagaaatcggaaatttttatatccgacaaaaccatggatgtaacctcactgttaaaaatatgtgctctgcggacgcggatgctcagttggatgctgtgttatcagccgctacagaaacatatagtggattaacaccggaacaaaaagcatacgtgccagctatgtttactgctgcgttaaacattcagacgagtgtaaacactgttgttagagattttgaaaattatgtgaaacagacttgtaattctagcgcggtcgtcgataacaaattaaagatacaaaacgtaatcatagatgaatgttacggagccccaggatctccaacaaatttggaatttattaatacaggatctagcaaaggaaattgtgccattaaggcgttgatgcaattgacgactaaggccactactcaaatagcacctaaacaagttgctggtacaggagttcagttttatatgattgttatcggtgttataatattggcagcgttgtttatgtactatgccaagcgtatgttgttcacatccaccaatgataaaatcaaacttattttagccaataaggaaaacgtccattggactacttacatggacacattctttagaacttctccgatggttattgctaccacggatatgcaaaactgaaaatatattgataatattttaatagattaacatggaagttatcactgatcgtctagacgatatagtgaaacaaaatatagcggatgaaaaatttgtagattttgttatacacggtctagagcatcaatgtcctgctatacttcgaccattaattaggttgtttattgatatactattatttgttatagtaatttatatttttacggtacgtctagtaagtagaaattatcaaatgttgttggcgttggtggcgctagtcatcacattaactattttttattactttatactataatagtactagactgacttctaacaaacatctcacctgccataaataaatgcttgatattaaagtcttctatttctaacactattccatctgtggaaaataatactctgacattatcgctaattgacacatcggtgagtgatatgcctataaagtaataatcttctttgggcacatataccagtgtaccaggttctaacaacctatttactggtgctcctatagcatactttttctttaccttgagaatatccatcgtttgcttggtcaatagcgatatgtgattttttatcaaccactcgaaaaagtaattggagtgttcatatcctctacgggctattgtctcatggccgtgtatgaaatttaagtaacacgactgtggtagatttgttctatagagccggttgccgcaaatagatagaactaccaatatgtctgtacaaatgttaaacattaattgattaacagaaaaaacaatgttcgttctgggaatagaaaccagatcaaaacaaaattcgttagaatatatgccacgtttatacattgaatataaaataactacagtttgaaaaataacagtatcatttaaacatttaacttgcggggttaatctcacaactttactgtttttgaactgttcaaaatatagcatagatccgtgagaaatacgtttagccgcctttaatagaggaaatcccaccgcctttctggatctcaccaacgacgatagttctgaccagcaactcatttcttcatcatccacctgttttaacatataataggcaggagatagatatccgtcattgcaatattccttctcgtaggcacacaatctaatattgataaaatctccattctcttctctgcatttattatcttgtttcggtggctgattaggctgtagtcttggtttaggctttggtatatcgttgttgaatctattttggtcattaaatctttcatttcttcctggtatatttttatcacctcgtttggttggatttttgtctatattatcgtttgtaacatcggtacgggtattcatttatcacaaaaaaaacttctctaaatgagtctactgctagaaaacctcatcgaagaagataccatattttttgcaggaagtatatctgagtatgatgatttacaaatggttattgccggcgcaaaatccaaatttccaagatctatgctttctatttttaatatagtacctagaacgatgtcaaaatatgagttggagttgattcataacgaaaatatcacaggagcaatgtttaccacaatgtataatataagaaacaatttgggtctaggagatgataaactaactattgaagccattgaaaactatttcttggatcctaacaatgaagttatgcctcttattattaataatacggatatgactgccgtcattcctaaaaaaagtggtaggagaaagaataagaacatggttatcttccgtcaaggatcatcacctatcttgtgtattttcgaaactcgtaaaaagattaatatttataaagaaaatatggaatccgcgtcgactgagtatacacctatcggagacaacaaggctttgatatctaaatatgcgggaattaatatcctaaatgtgtattctccttccacatccataagattgaatgccatttacggattcaccaataaaaataaactagagaaacttagtactaataaggaactagaatcgtatagttctagccctcttcaagaacccattaggttaaatgattttctgggactattggaatgtgttaaaaagaatattcctctaacagatattccgacaaaggattgattactataaatggagaatgttcctaatgtatactttaatcctgtgtttatagagcccacgtttaaacattctttattaagtgtttataaacacagattaatagttttatttgaagtattcgttgtattcattctaatatatgtattttttagatctgaattaaatatgttcttcatgcctaaacgaaaaatacccgatcctattgatagattacgacgtgctaatctagcgtgtgaagacgataaattaatgatctatggattaccatggatgacaactcaaacatctgcgttatcaataaatagtaaaccgatagtgtataaagattgtgcaaagcttttgcgatcaataaatggatcacaaccagtatctcttaacgatgttcttcgcagatgatgattcattttttaagtatttggctagtcaagatgatgaatcttcattatctgatatattgcaaatcactcaatatctagactttctgttattattattgatccaatcaaaaaataaattagaagccgtgggtcattgttatgaatctctttcagaggaatacagacaattgacaaaattcacagactttcaagattttaaaaaactgtttaacaaggtccctattgttacagatggaagggtcaaacttaataaaggatatttgttcgactttgtgattagtttgatgcgattcaaaaaagaatcctctctagctaccaccgcaatagatcctgttagatacatagatcctcgtcgcaatatcgcattttctaacgtgatggatatattaaagtcgaataaagtgaacaataattaattctttattgtcatcatgaacggcggacatattcagttgataatcggccccatgttttcaggtaaaagtacagaattaattagacgagttagacgttatcaaatagctcaatataaatgcgtgactataaaatattctaacgataatagatacggaacgggactatggacgcatgataagaataattttgaagcattggaagcaactaaactatgtgatgtcttggaatcaattacagatttctccgtgataggtatcgatgaaggacagttctttccagacattgttgaattctgtgagcgtatggcaaacgaaggaaaaatagttatagtagccgcactcgatgggacatttcaacgtaaaccgtttaataatattttgaatcttattccattatctgaaatggtggtaaaactaactgctgtgtgtatgaaatgctttaaggaggcttccttttctaaacgattgggtgaggaaaccgagatagaaataataggaggtaatgatatgtatcaatcggtgtgtagaaagtgttacatcgactcataatattatattttttatctaaaaaactaaaaataaacattgattaaattttaatataatacttaaaaatggatgttgtgtcgttagataaaccgtttatgtattttgaggaaattgataatgagttagattacgaaccagaaagtgcaaatgaggtcgcaaaaaaactgccgtatcaaggacagttaaaactattactaggagaattattttttcttagtaagttacagcgacacggtatattagatggtgccaccgtagtgtatataggatctgctcccggtacacatatacgttatttgagagatcatttctataatttaggagtgatcatcaaatggatgctaattgacggccgccatcatgatcctattttaaatggattgcgtgatgtgactctagtgactcggttcgttgatgaggaatatctacgatccatcaaaaaacaactgcatccttctaagattattttaatttctgatgtgagatccaaacgaggaggaaatgaacctagtacggcggatttactaagtaattacgctctacaaaatgtcatgattagtattttaaaccccgtggcgtctagtcttaaatggagatgcccgtttccagatcaatggatcaaggacttttatatcccacacggtaataaaatgttacaaccttttgctccttcatattcagctgaaatgagattattaagtatttataccggtgagaacatgagactgactcgagttaccaaatcagacgctgtaaattatgaaaaaaagatgtactaccttaataagatcgtccgtaacaaagtagttgttaactttgattatcctaatcaggaatatgactattttcacatgtactttatgctgaggaccgtgtactgcaataaaacatttcctactactaaagcaaaggtactatttctacaacaatctatatttcgtttcttaaatattccaacaacatcaactgaaaaagttagtcatgaaccaatacaacgtaaaatatctagcaaaaattctatgtctaaaaacagaaatagcaagagatccgtacgcagtaataaatagaaacgtactactgagatatactaccgatatagagtataatgatttagttactttaataaccgttagacataaaattgattctatgaaaactgtgtttcaggtatttaacgaatcatccataaattatactccggttgatgatgattatggagaaccaatcattataacatcgtatcttcaaaaaggtcataacaagtttcctgtaaattttctatacatagatgtggtaatatctgacttatttcctagctttgttagactagatactacagaaactaatatagttaatagtgtactacaaacaggcgatggtaaaaagactcttcgtcttcccaaaatgttagagacggaaatagttgtcaagattctctatcgccctaatataccattaaaaattgttagatttttccgcaataacatggtaactggagtagagatagccgatagatctgttatttcagtcgctgattaatcaattagtagagatgagataagaacattataataatcaataatatatcttatatctcgtttagaaaaatgctaatattaaaatagctaacgctagtaatccaatcggaagccatttgatatctataatagggtatctaatttcctgattcagatagcggacagctatattctcggtagctactcgtttggaatcacaaacattatttacatctaatttactatctgtaatggaaacgtttcccaatgaaatggtacaatccgatacattgcattttgttatatttttttttaaagaggctggtaacaacgcatcgcttcgtttacatggctcgtaccaacaataatagggtaatcttgtatctattcctatccgtactatgcttttatcaggataaatacatttacatcgtatatcgtctttgttagcatcacagaatgcataaatttgttcgtccgtcatgataaaaatttaaagtgtaaatataactattatttttatagttgtaataaaaagggaaatttgattgtataccttcggttctttaaaagaaactgacttgataaaaatggctgtaatctctaaggttacgtatagtctatatgatcaaaaagagattaatgctacagatattatcattagtcatgttaaaaatgacgacgatatcggtaccgttaaagatggtagactaggtgctatggatggggcattatgtaagacttgtgggaaaacggaattggaatgtttcggtcactggggtaaagtaagtatttataaaactcatatagttaagcctgaatttatttcagaaattattcgtttactgaatcatatatgtattcactgcggattattgcgttcacgagaaccgtattccgacgatattaacctaaaagagttatcgggacacgctcttaggagattaaaggataaaatattatccaagaaaaagtcatgttggaacagtgaatgtatgcaaccgtatcaaaaaattactttttcaaagaaaaaggtttgtttcgtcaacaagttggatgatattaacgttcctaattctctcatctatcaaaagttaatttctattcatgaaaagttttggccattattagaaattcatcaatatccagctaacttattttatacagactactttcccatccctccgttgattattagaccggctattagtttttggatagatagtatacccaaagaaaccaatgaattaacttacttattaggtatgatcgttaagaattgtaacttgaatgctgatgaacaggttatccagaaggcggtaatagaatacgatgatattaaaattatttctaataacacttccagtatcaatttatcatatattacatccggcaaaaataatatgattagaagttatatcgtcgcccgacgaaaagatcagacggctagatctgtaattggtcccagtacatctatcaccgttaatgaggtaggaatgcccgcatatattagaaatacacttacagaaaagatatttgttaatgcctttacagtggataaagttaaacaactattagcatcaaaccaagttaaattttactttaataaacgattaaaccaattaacaagaatacgccaaggaaagtttatcaaaaataaaatacatttattgcctggtgattgggtagaagtagctgttcaagaatatacaagtattatttttggaagacagccgtctctacatagatacaacgtcatcgcttcatctatcagagctaccgaaggagatactatcaaaatatctcccggaattgccaactctcaaaatgctgatttcgacggagatgaagaatggatgatattagaacaaaatcctaaagctgtaattgaacaaagtattcttatgtatccgacgacgttactcaaacacgatattcatggagcccccgtttatggatctattcaagatgaaatcgtagcagcgtattcattgtttaggatacaagatctttgtttagatgaagtattgaacatcttggggaaatatggaagagagttcgatcctaaaggtaaatgtaaattcagcggtaaagatatctatacttacttgataggtgaaaagattaattatccgggtctcttaaaggatggtgaaattattgcaaacgacgtagatagtaattttgttgtggctatgaggcatctgtcattggctggactcttatccgatcataagtcgaacgtggaaggtatcaactttattatcaagtcatcttatgtttttaagagatatctatctatttacggttttggggtgacattcaaagatctgagaccaaattcgacgttcactaataaattggaggccatcaacgtagaaaaaatagaacttatcaaagaagcatacgccaaatatctcaacgatgtaagagacgggaaaatagttccattatctaaagctttagaggcggactatgtggaatccatgttatccaacttgacaaatcttaatatccgagagatagaagaacatatgagacaaacgctgatagatgatccagataataacctcctgaaaatggccaaagcgggttataaagtaaatcctacagaactaatgtatattctaggtacgtatggacaacaaaggattgatggtgaaccagcagagactcgagtattgggtagagtcttaccttactatcttccagactctaaggatccagaaggaagaggttacattcttaattctttaacaaaaggattaacaggttctcaatattacttttcgatgctggttgcaagatctcaatctactgatatcgtctgtgaaacatcacgtaccggaacactggctagaaaaatcattaaaaagatggaggatatggtggtcgacggatacggacaagtagttataggtaatacgctcatcaagtacgccgccaattataccaaaattctaggctcagtatgtaaacctgtagatcttatctatccagatgagtccatgacttggtatttggaaattagtgctctgtggaataaaataaaacagggattcgtttactctcagaaacagaaacttgcaaagaagacattggcgccgtttaatttcctagtattcgtcaaacccaccactgaggataatgctattaaggttaaggatctgtacgatatgattcataacgtcattgatgatgtgagagagaaatacttctttacggtatctaatatagattttatggagtatatattcttgacgcatcttaatccttctagaattagaattacaaaagaaacggctatcactatctttgaaaagttctatgaaaaactcaattatactctaggtggtggaactcctattggaattatttctgcacaggtattgtctgagaagtttacacaacaagccctgtccagttttcacactactgaaaaaagtggtgccgtcaaacaaaaacttggtttcaacgagtttaataacttgactaatttgagtaagaataagaccgaaattatcactctggtatccgatgatatctctaaacttcaatctgttaagattaatttcgaatttgtatgtttgggagaattaaatccagacatcactcttcgaaaagaaacagataggtatgtagtagatataatagtcaatagattatacatcaagagagcagaaattaccgaattagtcgtcgaatatatgattgaacgattcatctcctttagcgtcattgtaaaggaatggggtatggaaacattcattgaggacgaggataatattagatttactgtctatctaaatttcgttgaaccagaggaattgaatcttagtaagtttatgatggttcttccgggggcagccaacaagggaaagattagtaaattcaagattcctatctctgattatacgggttatgacgacttcaatcaaacaaaaaagctcaataagatgactgtagaactcatgaatctaaaagaattaggttctttcgatttggaaaacgtcaacgtgtatcctggagtatggaatacatacgatatcttcggtatcgaggccgctcgtgaatacttgtgcgaagccatgttaaacacctatggagaagggttcgattatctgtatcagccttgtgatcttctcgctagtttactatgtgctagttacgaaccagaatcagtgaataaattcaagttcggcgcagctagtactcttaagagagctacgttcggagacaataaagcattgttaaacgcggctcttcataaaaagtcagaacctattaacgataatagtagctgccacttttttagcaaggtccctaatataggaactggatattacaaatactttatcgacttgggtcttctcatgagaatggaaaggaaactatctgataagatatcttctcaaaagatcaaggaaatggaagaaacagaagacttttaattcttatcaataacatatttttctatgatctgtcttttaaacgatggattttccacaaatgcgcctctcaagtccctcatagaatgatacacgtataaaaaatatagcataggcaatgactccttatttttagacattagatatgccaaaatcatagccccgcttctatttactcccgcagcacaatgaaccaacacgggctcgtttcgttgatcacatttagataaaaaggcggttacgtcgtcaaaatatttactaatatcggtagttgtatcatctaccaacggtatatgaataatattaatattagagttaggtaatgtatatttatccatcgtcaaatttaaaacatatttgaacttaacttcagatgatggtgcatccatagcatttttataatttcccaaatacacattattggttacccttgtcattatagtgggagatttggctctgtgcatatctccagttgaacgtagtagtaagtatttatacaaacttttcttatccatttataacgtacaaatggataaaactactttatcggtaaacgcgtgtaatttagaatacgttagagaaaaggctatagtaggcgtacaagcagccaaaacatcaacacttatattctttgttattatattggcaattagtgcgctattactctggtttcagacgtctgataatccagtctttaatgaattaacgagatatatgcgaattaaaaatacggttaacgattggaaatcattaacggatagcaaaacaaaattagaaagtgatagaggtagacttctagccgctggtaaggatgatatattcgaattcaaatgtgtggatttcggcgcctattttatagctatgcgattggataagaaaacatatctgccgcaagctattaggcgaggtactggagacgcgtggatggttaaaaaggcggcaaaggtcgatccatctgctcaacaattttgtcagtatttgataaaacacaagtctaataatgttattacttgtggtaatgagatgttaaatgaattaggttatagcggttattttatgtcaccgcattggtgttccgattttagtaatatggaatagtgttagataaatgcggtaacgaatgttcctgtaaggaaccataacagtttagatttaacgttaaagatgagcataaacataataaacaaaattacaatcaaacctataacattaatatcaaacaatccaaaaaatgaaatcagtggagtagtaaacgcgtacataactcctggataacgtttagtagctgccgttcctattctagaccaaaaattcggtttcatgttttcgaaacggtgttctgcaacaagtcggggatcgtgttctacatatttggcggcattatccagtatctgcctattgatcttcatttcgttttcaattctggctatttcaaaataaaatcccgatgatagacctccagactttataatttcatctacgatgttcagcgccgtagtaactctaataatataggctgataagctaacatcataccctcctgtatatgtgaatatggcatgatttttgtccattacaagctcggttttaactttattgcctgtaataatttctctcatctgtaggatatctatttttttgtcatgcattgccttcaagacgggacgaagaaacgtaatatcctcaataacgttatcgttttctacaataactacatattctacctttttattttctaactcggtaaaaaaattagaatcccatagggctaaatgtctagcgatatttcttttcgtttcctctgtacacatagtgttacaaaaccctgaaaagaagtgagtatacttgtcatcatttctaatgtttcctccagtccactgtataaacgcataatccttgtaatgatctggatcatccttgactaccacaacatttcttttttctggcataacttcgttgtcctttacatcatcgaacttctgatcattaatatgctcatgaacattaggaaatgtttctgatggaagtctatcaataactggcacaacaataacaggagttttcgccgccgccatttagttattgaaattaatcatatacaactctttaatacgagttatattttcgtctatccattgtttcacatttacatatttcgacaaaaagatataaaatgcgtattccaatgcttctctgtttaatgaattactaaaatatacaaacacgtcactgtctggcaataaatgatatcttagaatattgtaacaatttattttgtattgcacatgttcgtgatctatgagttcttcttcgaatggcataggatctccgaatctgaaaacgtataaataggagttagaataataatatttgagagtattggtaatatataaactctttagcggtataattagtttttttctctcaatttctatttttagatgtgatggaaaaatgactaattttgtagcattagtatcatgaactctaatcaaaatcttaatatcttcgtcacacgttagctctttgaagtttttaagagatgcatcagttggttcgaccgatggagtaggtgcaacaattttttgttcgatgtatgtatgtactggagccattgttttaactataatggtgcttgtatcgaaaaactttaatgcagatagcggaagctcttcgccgcgactttctacatcgtaattgggttctaacgccgatctctgaatggatactagttttctaagttctaatgtgattctctgaaaatgtaaatccaattcctccggcattatagatgtgtatacatcggtaaataaaactatagtatccaacgatcccttctcgcaaattctagtcttaaccaaaaaatcgtatataaccacggagatggcgtatttaagagtggattcttctaccgttttgttcttggatgtcatataggaaactataaagtccgcactactgttaagaatgattactaacgcaactatatagttcaaattaagcattttggaaacataaaataactctgtagacgatacttgactttcgaataagtttgcagacaaacgaagaaagaacagacctctcttaatttcagaagaaaactttttttcgtattcctgacgtctagagtttatatcaataagaaagttaagaattagtcggttaatgttgtatttcattacccaagtttgagatttcataatattatcaaaagacatgataatattaaagataaagcgctgactatgaacgaaatagctatatggttcgctcaaaaatatagtcttgttaaacgtggaaacgataactgtatttttaatcacgtcagcggcatctaaattaaatataggtatatttattccacacactctacaatatgccacaccatcttcataataaataaattcgttagcaaaattattaattttagtgaaatagttagcgtcaactttcatagcttccttcaatctaatttgatgctcacacggtgcgaattccactctaacatcccttttccatgcctcaggttcatcgatctctataatatctagttttttgcgtttcacaaacacaggctcgtctctcgcgatgagatctgtatagtaactatgtaaatgataactagatagaaagatgtagctatatagatgacgatcctttaagagaggtataataactttaccccaatcagatagactgttgttatggtcttcggaaaaagaatttttataaatttttccagtattttccaaatatacgtacttaacatctaaaaaatccttaatgataataggaatggataatccgtctattttataaagaaatacatatcgcacattatacttttttttggaaatgggaataccgatgtgtctacataaatatgcaaagtctaaatattttttagagaatcttaattggtccaaattcttttccaagtacggtaatagatttttcatattgaacggtatcttcttaatctctggttctagttccgcattaaatgatgaaactaagtcactatttttataactaacgattacatcacctctaacatcatcatttaccagaatactgatcttcttttgtcgtaaatacatgtctaatgtgttaaaaaaaagatcatacaagttatacgtcatttcatctgtggtattcttgtcattgaaggataaactcgtactaatctcttctttaacagcctgttcaaatttatatcctatatacgaaaaaatagcaaccagtgtttgatcatccgcgtcaatattctgttctatcgtagtgtataacaatcgtatatcttcttctgtgatagtcgatacgttataaaggttgataacgaaaatatttttatttcgtgaaataaagtcatcgtaggattttggacttatattcgcgtctagtagatatgcttttatttttggaatgatctcaattagaatagtctctttagagtccatttaaagttacaaacaactaggaaattggtttatgatgtataatttttttagtttttatagattctttattctatacttaaaaaatgaaaataaatacaaaggttcttgagggttgtgttaaattgaaagcgagaaataatcataaattatttcattatcgcgatatccgttaagtttgtatcgtaatggcgtggtcaattacaaataaagcggatactagtagcttcacaaagatggctgaaatcagagctcatctaaaaaatagcgctgaaaataaagataaaaacgaggatattttcccggaagatgtaataattccatctactaagcccaaaaccaaacgagccactactcctcgtaaaccagcggctactaaaagatcaaccaaaaaggaggaagtggaagaagaagtagttatagaggaatatcatcaaacaactgaaaaaaattctccatctcctggagtcagcgacattgtagaaagcgtggccgctgtagagctcgatgatagcgacggggatgatgaacctatggtacaagttgaagctggtaaagtaaatcatagtgctagaagcgatctctctgacctaaaggtggctaccgacaatatcgttaaagatcttaagaaaattattactagaatctctgcagtatcgacggttctagaggatgttcaagcagctggtatctctagacaatttacttctatgactaaagctattacaacactatctgatctagtcaccgagggaaaatctaaagttgttcgtaaaaaagttaaaacttgtaagaagtaaatgcgtgcacttttttataaagatggtaaactctttaccgataataattttttaaatcctgtatcagacgataatccagcgtatgaggttttgcaacatgttaaaattcctactcatttaacagatgtagtagtatatgaacaaacgtgggaggaggcgttaactagattaatttttgtgggaagtgattcaaaaggacgtagacaatacttttacggaaaaatgcatgtacagaatcgcaacgctaaaagagatcgtatttttgttagagtatataacgttatgaaacgaattaattgttttataaacaaaaatataaagaaatcgtccacagattccaattatcagttggcggtttttatgttaatggaaactatgttttttattagatttggtaaaatgaaatatcttaaggagaatgaaacagtagggttattaacactaaaaaataaacacatagaaataagtcccgatgaaatagttatcaagtttgtaggaaaggacaaagtttcacatgaatttgttgttcataagtctaatagactatataagccgctattgaaactgacggatgattctagtcccgaagaatttctgttcaacaaactaagtgaacgaaaggtatatgaatgtatcaaacagtttggtattagaatcaaggatctccgaacgtatggagtcaattatacgtttttatataatttttggacaaatgtaaagtccatatctcctcttccatcaccaaaaaagttaatagcgttaactatcaaacaaactgctgaagtggtaggtcatactccatcaatttcaaaaagagcttatatggcaacgactattttagaaatggtaaaggataaaaattttttagatgtagtatctaaaactacgttcgatgaattcctatctatagtcgtagatcacgttaaatcatctacggatggatgatatagatctttacacaaataattacaaaaccgataaatggaaatggataagcgtatgaaatctctcgcaatgaccgctttctttggggagctaagcacattagatattatggcattgataatgtctatatttaaacgccatccaaacaataccattttttcagtggataaggatggtcagtttatgattgatttcgaatacgataattataaggcttctcaatatttggatctgaccctcactccgatatctggagatgaatgcaagactcacgcatcgagtatagccgaacaattggcgtgtgtggatattattaaagaggatattagcgaatatatcaaaactactccccgtcttaaacgatttataaaaaaataccgcaatagatcagatactcgcatcagtcgagatacagaaaagcttaaaatagctctagctaaaggcatagattacgaatatataaaagacgcttgttaataagtaaatgaaaaaaaactagtcgtttataataaaacacgatatggatgccaacgtagtatcatcttctactattgcgacgtatatagacgctttagcgaagaatgcttcggaattagaacagaggtctaccgcatacgaaataaataatgaattggaactagtatttattaagccgccattgattactttgacaaatgtagtgaatatctctacgattcaggaatcgtttattcgatttaccgttactaataaggaaggtgttaaaattagaactaagattccattatctaaggtacatggtctagatgtaaaaaatgtacagttagtagatgctatagataacatagtttgggaaaagaaatcattagtgacggaaaatcgtcttcacaaagaatgcttgttgagactatcgacagaggaacgtcatatatttttggattacaagaaatatggatcctctatccgactagaattagtcaatcttattcaagcaaaaacaaaaaactttacgatagactttaagctaaaatattttctaggatccggtgcccagtctaaaagttctttattacacgctattaatcatccaaagtcaaggcctaatacatctctggaaatagaatttacacctagagacaatgaaacagttccatatgatgaactaataaaggaattgacgactctctcgcgtcatatatttatggcttctccagagaatgtaattctttctccgcctattaacgcgcctataaaaacctttatgttgcctaaacaagatatagtaggtttggatctggaaaatctatatgccgtaactaagactgacggcattcctataactatcagagttacatcaaacgggttgtattgttattttacacatcttggttatattattagatatcctgttaagagaataatagattccgaagtagtagtctttggtgaggcagttaaggataagaactggaccgtatatctcattaagctaatagagcctgtgaatgcaatcaatgatagactagaagaaagtaagtatgttgaatctaaactagtggatatttgtgatcggatagtattcaagtcaaagaaatacgaaggtccgtttactacaactagtgaagtcgtcgatatgttatctacatatttaccaaagcaaccagaaggtgttattctgttctattcaaagggacctaaatctaacattgattttaaaattaaaaaggaaaatactatagaccaaactgcaaatgtagtatttaggtacatgtccagtgaaccaattatctttggagagtcgtctatctttgtagagtataagaaatttagcaacgataaaggctttcctaaagaatatggttctggtaagattgtgttatataacggcgttaattatctaaataatatctattgtttggaatatattaatacacataatgaagtgggtattaagtccgtggttgtacctattaagtttatagcagaattcttagttaatggagaaatacttaaacctagaattgataaaaccatgaaatatattaactcagaagattattatggaaatcaacataatatcatagtcgaacatttaagagatcaaagcatcaaaataggagatatctttaacgaggataaactatcggatgtgggacatcaatacgccaataatgataaatttagattaaatccagaagttagttattttacgaataaacgaactagaggaccgttgggaattttatcaaactacgtcaagactcttcttatttctatgtattgttccaaaacatttttagacgattccaacaaacgaaaggtattggcgattgattttggaaacggtgctgacctggaaaaatacttttatggagagattgcgttattggtagcgacggatccggatgctgatgctatagctagaggaaatgaaagatacaacaaattaaactctggaattaaaaccaagtactacaaatttgactacattcaggaaactattcgatccgatacatttgtctctagtgtcagagaagtattctattttggaaagtttaatatcatcgactggcagtttgctatccattattcttttcatccgagacattatgctaccgtcatgaataacttatccgaactaactgcttctggaggcaaggtattaatcactaccatggacggagacaaattatcaaaattaacagataaaaagacttttataattcataagaatttacctagtagcgaaaactatatgtctgtagaaaaaatagctgatgatagaatagtggtatataatccatcaacaatgtctactccaatgactgaatacattatcaaaaagaacgatatagtcagagtgtttaacgaatacggatttgttcttgtagataacgttgatttcgctacaattatagaacgaagtaaaaagtttattaatggcgcatctacaatggaagatagaccatctacaagaaactttttcgaactaaatagaggagccattaaatgtgaaggtttagatgtcgaagacttacttagttactatgttgtttatgtcttttctaagcggtaaataataatatggtatgggttctgatctcccagttctaaatgcattaaataattccaatagagcgatttttgttcctataggaccttccaactgtggatactctgtattgttaatagatatattaatacttttgtcgggtaacagaggttctacgtcttttaaaaataaaagtttgataacatctggcctgttcataaataaaaacttggcgattctatatatactcttattatcaaatctagccattgtcttatagatgtgagctactgtaggtgtaccatttgattttctttctaatactatatatttctctcgaagaagttcttgcacatcatctgggaataaaatactactgttgagtaaatcagttattttttttatatcgatattgatggacatttttatagttaaggataataagtatcccaaagtagataacgacgataacgaagtatttatacttttaggaaatcacaatgactttatcagattaaaattaacaaaattaaaggagcatgtatttttttctgaatatattgtgactccagatacatatggatctttatgcgtcgaattaaatgggtctagttttcagcacggcggtagatatatagaggtggaggaatttatagatgctggaagacaagttagatggtgttctacatccaatcatatatctaaagatatacccgaagatatgcacactgataaatttgtcatttatgatatatacacttttgacgctttcaagaataaacgattggtattcgtacaggtacctccgtcgttaggagatgatagtcatttgactaatccgttattgtctccgtattatcgtaattcagtagccagacaaatggtcaatgatatgatttttaatcaagattcatttttaaaatatttattagaacatctgattagaagccactatagagtttctaaacatataacaatagttagatacaaggataccgaagaattaaatctaacgagaatatgttataatagagataagtttaaggcgtttgtattcgcttggtttaacggcgtttcggaaaatgaaaaggtactagatacgtataaaaaggtatctaatttgatataatgaattcagtgactgtatcacacgcgccatatactattacttatcacgatgattgggaaccagtaatgagtcaattggtagagttttataacgaagtagccagttggctgctacgagacgagacgtcgcctattcctgataagttctttatacagttgaaacaaccgcttagaaataaacgagtatgtgtgtgcggtatagatccgtatccgaaagatggaactggtgtaccgttcgaatcaccaaattttacaaaaaaatcaattaaggagatagcttcatctatatctagattaaccggagtaattgattataaaggttataaccttaatataatagacggggttataccctggaattattacttaagttgtaaattaggagaaacaaaaagtcacgcgatctactgggataagatttccaagttactgctgcagcatataactaaacacgttagtgttctttattgtttgggtaaaacagatttctcgaatatacgggccaagttagaatccccggtaactaccatagtcggatatcatccagcggctagagaccgccaattcgagaaagatagatcatttgaaattatcaacgttttactggaattagacaacaaggcacctataaattgggctcaagggtttatttattaatgctttagtgaaattttaacttgtgttctaaatggatgcggctattagaggtaatgatgttatctttgttcttaagactataggtgtcccgtcagcgtgcagacaaaatgaagatccaagatttgtagaagcatttaaatgcgacgagttagaaagatatattgagaataatccagaatgtacactattcgaaagtcttagggatgaggaagcatactctatagtcagaattttcatggatgtagatttagacgcgtgtctagacgaaatagattatttaacggctattcaagattttattatcgaggtgtcaaactgtgtagctagattcgcgtttacagaatgcggcgccattcatgaaaatgtaataaaatccatgagatctaatttttcattgactaagtctacaaatagagataaaacaagttttcatattatctttttagacacgtataccactatggatacattgatagctatgaaacgaacactattagaattaagtagatcatctgaaaatccactaacaagatcgatagacactgccgtatataggagaaaaacaactcttcgggttgtaggtactaggaaaaatccaaattgcgacactattcatgtaatgcaaccaccgcatgataatatagaagattacctattcacttacgtggatatgaacaacaatagttattacttttctctacaacaacgattggaggatttagttcctgataagttatgggaaccagggtttatttcattcgaagacgctataaaaagagtttcaaaaatattcattaattctataataaactttaatgatctcgatgaaaataattttacaacggtaccactggtcatagattacgtaacaccttgtgcattatgtaaaaaacgatcgcataaacatccgcatcaactatcgttggaaaatggtgctattagaatttacaaaactggtaatccacatagttgtaaagttaaaattgttccgttggatggtaataaactgtttaatattgcacaaagaattttagacactaactctgttttattaaccgaacgaggagaccatatagtttggattaataattcatggaaatttaacagcgaagaacccttgataacaaaactaattttgtcaataagacatcaactacctaaggaatattcaagcgaattactctgtccaagaaaacgaaagactgtagaagctaacatacgagacatgttagtagattcagtagagaccgatacctatccggataaacttccgtttaaaaatggtgtattggacctggtagacggaatgttttactctggagatgatgctaaaaaatatacgtgtactgtatcaaccggatttaaatttgacgatacaaagttcgtcgaagacagtccagaaatggaagagttaatgaatatcattaacgatatccaaccattaacggatgaaaataagaaaaatagagagctatatgaaaaaacattatctagttgtttatgcggtgctaccaaaggatgtttaacattcttttttggagaaactgcaactggaaagtcgacaaccaaacgtttgttaaagtctgctatcggtgacctgtttgttgagacgggtcaaacaattttaacagatgtattggataaaggacctaatccatttatcgctaacatgcatttgaaaagatctgtattctgtagcgaactacctgattttgcctgtagtggatcaaagaaaattagatctgacaatattaaaaagttgacagaaccttgtgtcattggaagaccgtgtttctccaataaaattaataatagaaaccatgcgacaatcattatcgatactaattacaaacctgtttttgataggatagataacgcattaatgagaagaattgccgtcgtgcgattcagaacacacttttctcaaccttctggtagagaggctgctgaaaataatgacgcgtacgataaagtcaaactattagacgaggggttagatggtaaaatacaaaataatagatatagattcgcatttctatacttgttggtgaaatggtacagaaaatatcatgttcctattatgaaactatatcctacacccgaagagattcctgactttgcattctatctcaaaataggtactctgttagtatctagctctgtaaagcatattccattaatgacggacctctccaaaaagggatatatattgtacgataatgtggtcactcttccgttgactactttccaacagaaaatatccaagtattttaattctagactatttggacacgatatagagagcttcatcaatagacataagaaatttgccaatgttagtgatgaatatctgcaatatatattcatagaggatatttcatctccgtaaatatatgctcatatatttatagaagatatcacatatctaaatgaataccggaatcatagatttatttgataatcatgttgatagtataccaactatattacctcatcagttagctactctagattatctagttagaactatcatagatgagaacagaagcgtgttattgttccatattatgggatcaggtaaaacaataatcgctttgttgttcgccttggtagcttccagatttaaaaaggtttacattctagtgcctaatatcaacattttgaaaatttttaattataatatgggtgtagctatgaacttgtttaatgacgaattcatagctgagaatatctttattcattccacaacaagtttttattctcttaattataacgataacgtcattaattataacggattatctcgctacaataactctatttttatcgttgatgaggcacataatatctttgggaataatactggagaacttatgaccgtgataaaaaataaaaacaagattccttttctactattgtctggatctcccattactaacacacctaatactctgggtcatattatagatttaatgtccgaagagacgatagattttggtgagattattagtcgtggtaagaaagtaattcagacacttcttaacgaacgcggtgtgaatgtacttaaggatttgcttaaaggaagaatatcatattacgaaatgcctgataaagatctaccaacgataagatatcacggacgtaagtttctagatactagagtagtatattgtcacatgtctaaacttcaagagagagattatatgattactagacgacagctatgttatcatgaaatgtttgataaaaatatgtataacgtgtcaatggcagtattgggacaacttaatctgatgaataatttagatactttatttcaggaacaggataaggaattgtacccaaatctgaaaataaataatggcgtgttatacggagaagaattggtaacgttaaacattagttccaaatttaaatactttattaatcggatacagacactcaacggaaaacattttatatacttttctaattctacatatggcggattggtaattaaatatatcatgctcagtaatggatattctgaatataatggttctcagggaactaatccacatatgataaacggcaaaccaaaaacatttgctatcgttactagtaaaatgaaatcgtctttagaggatctattagatgtgtataattctcctgaaaacgatgatggtagtcaattgatgtttttgttttcgtcaaacattatgtccgaatcctatactctgaaagaggtaaggcatatttggtttatgactatcccagatactttttctcaatacaaccaaattcttggacgatctattagaaaattctcttacgccgatatttctgaaccagttaatgtatatcttttagccgccgtatattccgatttcaatgacgaagtaacgtcattaaacgattacacacaggatgaattgattaatgttttaccatttgacatcaaaaagctgttatatctaaaatttaagactaaagaaacgaatagaatatactctattcttcaagagatgtctgaaacgtattctcttccaccacatccatcaattgtaaaagttttattgggagaattggtcagacaatttttttataataattctcgtattaagtataacgactccaagttacttaaaatggttacatcagttataaaaaataaagaagacgctaggaattacatagatgatattgtaaacggtcacttctttgtatcgaataaagtatttgataaatctcttttatacaaatacgaaaacgatattattacagtaccgtttagactttcctacgaaccatttgtttggggagttaactttcgtaaagaatataacgtggtatcttctccataaaactgatgaaatatataaagaaataaatgtcgagctttgttaccaatggataccttccagttacattggaaccacacgagctgacgttagacataaaaactaatattaggaatgccgtatataagacgtatctccatagagaaattagtggtaaaatggccaagaaaatagaaattcgtgaagacgtggaattacctctcggcgaaatagttaataattctgtagttataaacgttccgtgtgtaataacctacgcgtattatcacgttggggatatagtcagaggaacattaaacatcgaagatgaatcaaatgtaactattcaatgtggagatttaatctgtaaactaagtagagattcgggtactgtatcatttagcgattcaaagtactgcttttttcgaaatggtaatgcgtatgacaatggcagcgaagtcactgccgttctaatggaggctcaacaaggtatcgaatctagttttgtttttctcgcgaatatcgtcgactcataaaaaagagaatagcggtaagtataaacacgaatactatggcaataattgcgaatgttttattctcttcgatatatttttgataatatgaaaaacatgtctctctcaaatcggacaaccatctcataaaatagttctcgcgcgctggagaggtagttgctgctcgtataatctccccagaataatatacttgcgtgtcgtcgttcaatttatacggatttctatagttctctgttatataatgcggttttccatcatgattagacgacgacaatagtgttctgaatttagatagttgatcagaatgaatgtttattggcgttggaaaaattatccatacagcgtctgcagagtggttgatagttgttcctagatatgtaaaataatccaacttactaggcagcaaattgtctagataaaatactgaatcaaacggtgcagacgtattggcggatctaatggaatccaattgattaactatcttttgaaaatatacatttttatgatccaatacttgtaagaatatagaaataatgataagtccatcatcgtgtttttttgcctcttcataagaactatattttttcttattccaatgaacaagattaatctctccagagtatttgtacacatctatcaagtgattggatccataatcgtcttcctttccccaatatatatgtagtgatgataacacatattcattggggagaaaccctccacttatatatcctcctttaaaattaatccttactagttttccagtgttctggatagtggttggtttcgactcattataatgtatgtctaacggcttcaatcgcgcgttagaaattgcttttttagtttctatattaataggagatagttgttgcggcatagtaaaaatgaaatgataactgtttaaaaatagctcttagtatgggaattacaatggatgaggaagtgatatttgaaactcctagagaattaatatctattaaacgaataaaagatattccaagatcaaaagacacgcacgtgtttgctgcgtgtataacaagtgacggatatccgttaataggagctagaagaacttcattcgcgttccaggcgatattatctcaacaaaattcagattctatctttagagtatccactaaactattacggtttatgtactacaatgaactaagagaaatctttagacggttgagaaaaggttctatcaacaatatcgatcctcactttgaagagttaatattattgggtggtaaactagataaaaaggaatctattaaagattgtttaagaagagaattaaaagaggaaagtgatgaacgtataacagtaaaagaattcggaaatgtaattctaaaacttacaacgcgcgataaattatttaataaagtatatataggttattgcatggcgtgttttattaatcaatcgttggaggatttatcgcatactagtatttacaatgtagaaattagaaagattaaatcattaaatgattgtattaacgacgataaatacgaatatctgtcttatatttataatatgctagttaatagtaaatgaacttttacagatctagtataattagtcagattattaagtataatagacgactagctaagtctattatttgcgaggatgactctcaaattattacactcacggcattcgttaaccaatgcctatggtgtcataaacgagtatccgtgtccgctattttattaactactgataacaaaatattagtatgtaacagacgagatagttttctctattctgaaataattagaactagaaacatgtttagaaagaaacgattatttctgaattattccaattatttgaacaaacaggaaagaagtatactatcgtcatttttttctctagatccagctactgctgataatgatagaatagacgctatttatccgggtggcatacccaaaaggggtgagaatgttccagagtgtttatccagggaaattaaagaagaagttaatatagacaattcttttgtattcatagacactcggttttttattcatggcatcatagaagataccattattaataaattttttgaggtaatcttctttgtcggaagaatatctctaacgagtgatcaaatcattgatacatttaaaagtaatcatgaaatcaaggatctaatatttttagatccgaattcaggtaatggactccaatacgaaattgcaaaatatgctctagatactgcaaaactcaaatgttatggccatagaggatgttattacgaatcattaaaaaaattaactgaggatgattgattagaaaatataaattaatttaccatcgtgtatttttataacgggattgtccggcatatcatgtagatagttaccgtctacatcgtatactcgaccatctacgcctttaaatcctctatttattgacattaatctattagaattggaataccaaatattagtaccctcaattagtttattggtaatatttttgttagacgatagatcgatggctcttgaaaccaaggttttccaaccggactcattgtcgatcggtgagaagtctttttcattagcatgaatccattctaatgatgtatgtttaaacactctaaacaattggacaaattcttttgatttgctttgaatgatttcaaataggtcttcgtctacagtaggcataccattagataatctagccattataaagtgcacgtttacatatctacgttctggaggagtaagaacgtgactattgagacgaatggctcttcctactatctgacgaagagacgcctcgttccatgtcatatctaaaatgaagatatcattgattgagaagaagctaataccctcgcctccactagaagagaatacgcatgttttaatgcattctccgttagtgtttgattcttggttaaactcagccaccgccttgattctagtatcttttgttctagatgagaactctatattagagataccaaagactttgaaatatagtaataagatttctattcctgactgattaacaaatggttcaaagactagacatttaccatgggatgctaatattcccaaacatacatctataaatttgacgcttttctcttttaattcagtaaatagagagatatcagccgcactagcatcccctcccaatagttctccccttttaaaggtatctaatgcagatttagaaaattctctatctcttaatgaatttttaaaatcattatatagtgttgctatctcttgcgcgtattcgcccggatcacgattttgtctttcaggaaagctatcgaacgtaaacgtagtagccatacgtctcagaattctaaatgatgatatacctgtttttatttcagcgagtttagccttttgataaatttcttcttgctttttcgacatattaacgtatcgcattaatactgttttcttagcgaatgatgcagacccttctacgtcatcaaaaatagaaaactcgttattaactatgtacgaacataggcctcctagtttggagactaattctttttcatcaactagacgtttattctcaaatagcgattggtgttgtaaggatcctggtcgtagtaagttaaccaacatggtgaattcttgcacactattgacgataggtgtagccgataaacaaatcatcttatggttttttaatgcgatggtcttagataaaaaattatatactgaacgagtaggacggatcttaccatcttctttgattaatgatttagaaatgaagttatgacattcatcaataatgacgcatattctactcttggaattaatagttttgatattagtaaaaaatttatttctaaaattttgatcatcgtaattaataaaaatacaatccttcgttatctctggagcgtatctgagtatagtgttcatccaaggatcttctatcaaagcctttttcaccaataagataatagcccaattcgtataaatatccttaagatgtttgagaatatatacagtagtcattgttttaccgacacccgtttcatggaacaataaaagagaatgcatactgtctaatcctaagaaaactcttgctacaaaatgttgataatccttgaggcgtactacgtccgaccccatcatttcaacaggcatattagtagttctgcgcaatgcataatcgatataggccgcgtgtgatttactcatttatgagtgataagtaataactatgttttaaaaatcacagcagtagtttaactagtcttctctgatgtttgttttcgatactttttgaatcagaagtcatactagaataaagcaacgagtgaacgtaatagagagcttcgtatactctattcgaaaactctaagaacttattaatgaattccgtatccactggattgtttaaaatactaaattgaacactgttcacatccttccaagaagaagacttagtgacggacttaacatgagacataaataaatccaaattttttttacaaacatcactagccaccataatggcgctatcttttaaccagctatcgcttacgcattttagcagtctaacatttttaaagagactacaatatattctcatagtatcgattacacctctaccgaataaagttggaagtttaataatacaatatttttcgtttacaaaatcaaataatggtcgaaacacgtcgaaggttaacatcttataatcgctaatgtatagattgttttcagtgagatgattattagatttaatagcatctcgttcacgtttgaacagtttattgcgtgcgctgaggtcggcaactacggcgtccgctttagtactcctcccataatactttacgctattaatctttaaaatttcatagactttatctagatcgctttctggtaacatgatatcatgtgtaaaaagttttaacatgtcggtcggcattctatttagatcattaactctagaaatctgaagaaagtaattagctccgtattccagactaggtaatgggcttttacctagagacagattaagttctggcaatgtttcataaaatggaagaaggacatgcgttccctcccggatattttttacaatttcatccatttacaactctatagtttgttttcattattattagttattatctcccataatcttggtaatacttaccccttgatcgtaagataccttatacaggtcattacatacaactaccaattgtttttgtacataatagattggatggttgacatccatggtggaataaactactcgaacagatagtttatctttccccctagatacattagccgtaatagttgtcggcctaaagaatatctttggtgtaaagttaaaagttagggttcttgttccattattgctttttgtcagtagttcattataaattctcgagatgggtccgttctctgaatatagaacatcatttccaaatctaacttctagtctagaaataatatcggtcttattcttaaaatctattcccttgatgaagggatcgttaatgaacaaatccttggcctttgattcggctgatctattatctccgttatagacgttacgttgactagtccaaagacttacaggaatagatgtatcgatgatgttgatactatgtgatatgtgagcaaagattgttctcttagtggcatcactatatgttccagtaatggcggaaaactttttagaaatgttatatataaaagaattttttcgtgttccaaacattagcagattagtatgaagataaacactcatattatcaggaacattatcaatttttacatacacatcagcatcttgaatagaaacgataccatcttctggaacctctacgatctcggcagactccggataaccagtcggtggaccatcgctaacaataactagatcatccaacaatctactcacatatgcatctatataatctttttcatcttgtgagtaccctggatacgaaataaatttattatccgtatttccataataaggtttagtataaacagagagcgatgttgccgcatgaacttcagttacagtcgccgttggttggtttatttgacctattactctcctaggtttctctataaatgatggtttaatttgtacattcttaaccatatatccaataaagctcaattcaggaacataaacaaattctttgttgaacgtttcaaagtcgaacgaagagtcacgaataacgatatcggatactggattgaaggttaccgttacggtaatttttgaatcggatagtttaagactgctgaatgtatcttccacatcaaacggagttttaatataaacgtatactgtagatggttctttaatagtgtcattaggagttaggccaatagaaatatcattaagttcactagaatatccagagtgtttcaaagcaattgtattattgatacaattattatataattcttcgccctcaatttcccaaataacaccgttacacgaagagatagatacgtgattaatacatttatatccaacatatggtacgtaaccgaatcttcccatacctttaacttctggaagttccaaactcagaaccaaatgattaagcgcagtaatatactgatccctaatttcgaagctagcgatagcctgattgtctggaccatcgtttgtcataactccggatagagaaatatattgcggcatatataaagttggaatttgactatcgactgcgaagacattagaccgtttaatagagtcatccccaccgatcaaagaattaatgatagtattattcattttctatttaaaatggaaaaagcttacaataaactccgtagagaaatatctataatttgtgagttttccttaaagtaacagcttccgtaaacgccgtctttatctcttagtaagtttattgtatttataaccttttccttatcttcatagaatactaaaggcaacaaagaaatttttggttcttctctaagagctacgtgagacttaaccatagacgccaacgaatccctacatattttagaacagaaatacccaacttcaccacccttgaatgtctcaatactaataggtttaaaaaccaaatcttgattacaaaaccaacacttatcaattacactatttgtcttaatagacacatctgccatagatttataatactttggtagtatacaagcgagtgcttcttctttagcgggcttaaagactgctttaggtgctgaaataaccacatctggaaggcttactcgcttagccatttaattacggaactatttttttatacttctaatgagcaagtagaaaacctctcatctacaaaaacatactcgtgtccataatcctctaccatagttacacgttttttagatctcatatgtgctaaaaagttttcccatactaattggttactattatttttcgtataatttttaacagtttgaggttttagatttttagttacagaagtgatatcgaatattttatccaaaaagaatgaataattaattgtcttagaaggagtgttttcttggcaaaagaataccaagtgcttaaatatttctactacttcattaatcttttctgtactcagattcagtttctcatcttttacttgattgattatttcaaagactaacttataatcctttttatttattctctcgttagccttaagaaaactagatacaaaatttgcatctacatcatccgtggatatttgatttttttccatgatatccaagagttccgagataatttctccagaacattgatgagacaataatctccgcaatacatttctcaaatgaataagtttattagacacatggaagtttgactttttttgtacctttgtacatttttgaaataccgactcgcaaaaaatacaatattcatatccttgttcagatactataccgttgtgtctacaaccgctacataatcgtagattcatgttaacactctacgtatctcgtcgtccaatattttatataaaaacattttatttctagacgttgccagaaaatcctgtaatatttttagttttttgggctgtgaataaagtatcgccctaatattgttaccgtcttccgccaatatagtagttaaattatccgcacatgcaaaagaacaccgcttaggcggattcagtacaatgttatatttttcgtaccaactcatttaaatatcataatctaaaatagttctgtaatatgtctagcgctaatatattgatcataatcctgtgcataaattaagatacaacaatgtctcgaaatcatcgacatggcttcttccatagttagaagatcgtcgtcaaagttagcaacgtgattcatcaacatttgctgttttgaggcagcaaatactgaaccgtcgccattcaaccattcataaaaaccatcgtctgaatccattgataatttcttgtactggtttttgagagctcgcatcaatctagcatttctagctcccggattgaaaacagaaagaggatcgtacatccagggtccattttctgtaaatagaatcgtataatgtcccttcaagaagatatcagacgatccacaatcaaagaattggtctccgagtttgtaacaaactgcggactttaacctatacatgataccgtttagcatgatttctggtgatacgtcaatcggagtatcatctattagagatctaaagccggtgtaacattctccaccaaacatattcttattctgacgtcgttctacataaaacatcattgctccattaacgataacaggggaatgaacagcactacccatcacattagttcccaatggatcaatgtgtgtaactccagaacatcttccatatcctatgttaggaggagcgaacaccactcttccactattgccatcgaatgccatagaataaatatccttggaattgatagaaatcggactgtcggatgttgtgatcatcttcataggattaacaactatgtatggtgccgcctgaagtttcatatcgtaactgatgccgtttataggtctagccacagaaaccaacgtaggtctaaatccaactatagacaaaatagaagccaatatctgttcctcatctgtcataacttgagagcatccagtatgaataatcttcattagatggggatctaccgcatcatcatcgttacaataaaaaattcccattctaatgttcataattgcttttctaatcatggtatgcatgtttgctctctgaatctctgtggaaattagatctgatacacctgtaatcactatcggattatcctccgtaagacgattaaccaacaacatataattataagactttacttttctaaattcataaagttgctggattaggctataggtgtctccatgtacatacgcgttctcgagcgcaggaagtttaataccgaatagtgccatcagaataggatgaatatagtaattagtttctggttttctataaataaaagacaaatcttgtgaactagacatatcggtaaaatgcatggattggaatcgtgtagtcgacagaagaatatgatgattagatggagagtatattttatctaactctttgagttggtcaccgattctaggactagctcgagaatgaataagtactaaaggatgagtacatttcacagaaacactagcattgttcaatgtgctctttacatgggtaaggagttgaaatagctcgtttctatttgttctgacaatatttagtttattcataatgttaagcatatcctgaatagtaaagttagatgtgtcatacttgttagtagttagatatttagcaattgcattcccatcatttctcaatctcgtactccaatcatgtgtagatgctacttcgtcgatggaaaccatacaatcctttttgataggctgttgagattgattatttcctgcacgtttaggtttggtacgttgatttctagcccctgcggatataaagtcatcgtctacaatttgggacaatgaattgcatacactacaagacaaagatttatcagaagtgtgaatatgatcttcatctaccaaagaaagagtttgattagtataactagattttagtcctgcgttagatgttaaaaaaacatcgctattgaccacggcttccattatttatattcgtagtttttactcgaaagcgtgattttaatatccaatcttattacttttggaatcgttcaaaacctttgactagttgtagaatttgatctattgccctacgcgtatactcccttgcatcatatacgttcgtcaccagatcgtttgtttcggcctgaagttggtgcatatctctttcaacattcgacatgagatccttaagggccatatcgtctagattttgttgagatgctgctcctggatttggattttgttgtgctgttgtacatactgtaccaccagtaggtgtaggagtacatacagtggccacaataggaggttgaggaggtgtaaccgttggagtagtacaagaaatatttccatccgattgttgtgtacatgtagttgttggtaacgtctgagaaggttgggtagatggcggtgtcgtcgtcttttgatctttattaaatttagagataatatcctgaacagcattgctcggcgtcaacgctggaaggagtgaactcgccggcgcatcagtatcttcagacagccaatcaaaaagattagacatatcagatgatgtattagtttgttgtcgtggttttggtgtaggaacagtactactaggtagaagaataggagccggtgtagctgttggaaccggctgtggagttatatgaatagttggttgtagcggttggataggctgtctgctggcgaccgtcatattatctctagctagttgttctcgcaactgtctttgataatacgactcttgagactttagtcctatttcaatcgcttcatcctttttcgtatccggatccttttcttcagaataatagattgacgactttggtgtagaggattctgccagcccctgtgagaacttgttaaagaagtccatttaaggctttaaaattgaattgcgattataagattaaatggcagacacagacgatattatcgactatgaatccgatgatctcaccgaatacgaggatgatgaagaagaggaagaagatggagagtcactagaaactagtgatatagatcccaaatcttcttataagattgtagaatcagcatccactcatatagaagatgcgcattccaatcttaaacatatagggaatcatatatctgctcttaaacgacgctatactagacgtataagtctatttgaaatagcgggtataatagcagaaagctataacttgcttcaacgaggaagattacctctagtttcagaattttctgacgaaacgatgaagcaaaatatgctacatgtaattatacaagagatagaggagggttcttgtcctatagtcatcgaaaagaacggagaattgttgtcggtaaacgattttgacaaagatggtctaaaattccatctagactatattatcaaaatttggaaacttcaaaaacgatattagaatttatacgaatatcgttctctaaatgtcacaatcaagtctcgcatgttcagcaatttattgtcgtactttatatcgtgttcattaacgatatcttgcaaaatagtaatgattctatcttccttcgatagatattcttcagagattattgtcttatattttttcttgttatccgatatgaatttgataagactttgaacattattgatacccgtctgtttaattttttctacagatattttagttttggcagattctatcgtatctgtcaatagacatccaacatcgacattcgacgtcaattgtctataaatcaacgtataaattttagaaataacattagcgaattgttgtgcattgatgtcgttattctgaaacagtatgattttaggtagcattttcttaacaaagagaacgtatttattgttactcagttgaacagatgatatatccagattactaacgcatctgattccgtataccaaactttcagaagaaatggtgtacaattgtttgtattcattcaatgtctctttttcagaaattagtttagagtcgaatactgcaataattttcaagagatagttttcatcagataagattttatttagtgtagatatgataaaactattgttttgttggagaacttgatacgccgcgttctctgtagtcgacgctctcaaatgggaaacaatctccattatttttttggaatcggatactatatcttcggtatcttgacgcagtctagtatacatagagttaagagagattagagtttgtacattaagcaacatgtctctaaatgtggctacaaacttttcctttttcacataatctagtttattatataccgatttcacaacggcaccagatttaaggaaccagaatgaaaaactctgataactacaatatttcatcatagttacgattttatcatcttctatagttggtgtaatagcgcatacctttttctccaagactggaaccaacgtcataaaaatgtttaaatcaaaatccatatcaacatctgatgcgctaagaccagtctcgcgttcaagattatctttactaatggtgacgaactcatcatatagaactctaagtttgtccattatttatttacagatttagttgtttaatttatttgtgctcttccagagttgggatagtatttttctaacgtcggtattatattattaggatctacgttcatatgtatcataatattaatcatccacgttttgataaatctatctttagcttctgaaataacgtatttaaacaaaggagaaaaatatttagctacggcatcagacgcaataacattttttgtaaatgtaacgtatttagacgacagatcttcgttaaaaagttttccatctatgtagaatccatcggttgttaacaccattcccgcgtcagattgaataggagtttgaatagtttgttttggaaatagatccttcaataacttatagttgggtgggaaaaaatcgattttatcactagactctttcttttttactatcattacctcatgaactatttcttgaatgagtatatgtattttctttcctatatcggacgcgttcattggaaaatataccatgtcgttaactataagaatatttttatcctcgtttacaaactgaataatatcagatgtagttcgtaaacgaactatatcatcaccagcacaacatctaactatatgatatccactagtttcctttagccgtttattatcttgttccatattagcagtcattccatcatttaagaaggcgtcaaagataatagggagaaatgacattttggattctgttacgactttaccaaaattaaggatatacggacttactatctttttctcaacgtcgatttgatgaacacacgatgaaaatgtgcttctatgagattgatcatgtagaaaacaacaagggatacaatatttccgcatatcatgaaatatattaagaaatcccaccttattatatttccccaaaggatccatgcatgtaaacattatgccgttatcattaataaagacttctttctcatcggatttgtaaaagttgttactgatttttttcattccaggatctagataattaataatgatgggttttctattcttattctttgtattttggcatatcctagaccagtaaacagtttccactttggtaaaatcagcagacttttgaacgctattaaacatggcattaatggcaataactaaaaatgtaaaatatttttctatgttaggaatatggtttttcactttaatagatatatggtttttggccaaaatgatagatatttttttatccgaggatagtaaaatattattagtcgccgtctctataaaaatgaagctagtctcgatatccaattttattctagaattgataggagtcgccaaatgtaccttatacgttatatctcccttgatgcgttccatttgtgtatctatatcggacacaagatctgtaaatagttttacgttattaatcatcacggtatcgccgtcgctagataacgctaatgtaccatccaagtcccaaatggagagatttaactgttcatcgtttagaataaaatgattaccggtcatattaataaagtgttcatcgtatctagataacaacgacttataattaatgtccaagtcttgaactcgctgaatgatcttttttaacccagttagttttagattggtacgaaatatattgttaaactttgattctacagtaatgtccaaatctagttgtggaaatacttccatcaacattgtttcaaacttgataatattattatctacatcttcatacgatccaaattccggaatagatgtatcacatgctcttgccacccagataaccaaaaagtcacacgctccaggatatacattgtataaaaagctatcgttttttagtagtgtttttttctgagtatatacgaagggattaaaaatagtattatcaacgtaactatattccaaattattcttatgagaatagataataatatcgtccttaatatctaacaaatttcctaaatatccctttaattgagtcattcgaagcgtcaatagaatatgtctcttaactatttccggctgttgtatatttaaatgacttcgtaaaaaataatatatgggcgacttctcatctatgtaatcatatggagtgagatatagggctcgttctacctcctgccccttacccacctgtaataccaattgcggacttactatatatcgcatatttatatcgtggggtaaagtgaaaatctactaccgatgatgtaagtcttacaatgttcgaaccagtaccagatcttaatttggaggcctccgtagaactaggggaggtaaatatagatcaaacaacacctatgataaaggaaaatagcggttttatatcccgtagtagacgtctattcgcccatagatctaaggatgatgagagaaaactagcactacgattctttttacaaagactttattttttagatcatagagagattcattatttgttcagatgcgttgacgctgtaaaagacgtcactattaccaaaaaaaataacattatcgtggcgccttatatagcacttttaactatcgcatcaaaaggatgcaaacttacagaaacaatgattgaagcattttttccagaactatataatgaacatagtaagaaatttaaattcaactctcaagtatccatcatccaagaaaaactcggataccagtttggaaactatcacgtttatgattttgaaccgtattactctacagtagctctggctattcgagatgaacattcatctggcatttttaatatccgtcaagagagttatctggtaagttcattatctgaaataacatatagattttatctaattaatctaaaatctgatcttgttcaatggagtgctagtacgggcgctgtaattaatcaaatggtaaatactgtattgattacagtgtatgaaaagttacaactggtcatagaaaatgattcacaatttacatgttcattggctgtggaatcaaaacttccaataaaattacttaaagatagaaatgaattatttacaaaattcattaacgagttaaaaaagaccagttcattcaagataagcaaacgcgataaggatacgctactaaaatattttacttaggactggagttagaatttatagacgactcatttcgtttatcattgttactattattactattactatcattattagtgttggcattattagtattcttcttgtcatcttgttcagaaatatacagcaatgctatacctaatactaaatacattatcatgctcgcaatggctctaacaacaacgaaccaaaatgaatttggtcgtagcttttgttcacaaaaatacataaagaaatgtctacataaatctatggcgccattggctacttgaaatagcgccagtcctcctacagattttaatatagctgtataacatgacatttattcatcatcaaaagagacagagtcaccatctgtcatatttagattttttttcatgtgttcaaagtatcctctactcatttcattataatagtttatcatacttagaattttaggacggatcaatgagtaagacttgactagatcgtcagtagtaatttgtgcatcgtctattctgcatccgcttcgtcgaataatgtatagcatcgctttgagattctccatagctatcaagtctttatacaatgacatggaaatatctgtgaatactttatacttctccaacatcgatgccttaacatcatcgcctactttagcattgaaaatacgttctattgtgtagatggatgtagcaagatttttaaacaacaatgccatcttacacgatgattgcctcaagtctccaatcttttgtttagaacgattagctacagagttcaacgcttggctgactagcatattattatctttagaaattgtattcttcaatgaggcgtttatcatatctgtgatttcgttagtcatattacagtctgactgggttgtaatgttatccaacatatcacctatggatacggtacacgtaccagcatttgtaataatcctatctaagatgttgtatggcattgcgcagaaaatatcttctcctgtaatatctccactctcgataaatctactcagattattcttaaatgccttattctctggagaaaagatatcagtgtccatcatttcattaatagtatacgcagaaaagataccacgagtatcaattctatccaagatacttatcggttccgagtcacagataatggtttcctctccttcgggagatcctgcatagaaatatctaggacaatagtttctatactgtctgtaactctgataatctctaaagtcactaactgataccatgaaattgagaagatcaaacgctgaagtaatcaatttttctgcctcgtttttactacaactagttttcatcaatgtagcgacgatgtattgtttagttactcttggtctaatactgatgatagagatattattgcttcccataatggatcttctagtagtcaccttaaagcccattgatgcgaatagcagatagataaagtcttggtatgactcctttctaatatagtacggactacctttgtcacccaactttatacccacataagccataacaacctctttaatagccgtttcatgaggtttatcagccatgagcctgagtagttggaagaatctcatgaatcccgtctcagaaagtcctatatgcatgatagatttatctttcctgggaaactctcgtatagtcatagatgaaatactcttcaaagtttctgaaataagattagtaacagtcttacctccgactactctgggtaacaaacatactctaataggtgttttctctgcggagataatatcagaaaggatagagcaataagtagtattattgtgattataaagaccgaatacataacaggtagaatttataaacatcatgtcctgaaggtttttagacttgtattcctcgtaatccataccgtcccaaaacatggatttggtaactttgatagccgtagatctttgttccttcgccaacaggttaaagaaattaataaagaatttgttgtttctatttatgtccacaaattgcacgtttggaagcgccacggttacattcactgcagcattttgaggatcgcgagtatgaagtacgatgttattgtttactggtatatctggaaagaaatctaccagtctaggaataagagattgatatcgcatagaaatagtaaagtttataatctcatcatcgaagagcattttgttaccattgtaataaatatccactctgtcatatgtataaatgaagtactgttcaaacatgatgagatgtttatatgttggcatagtagtgagatcgacgtttggtaatggcaatgtattaagattaactccataatgtctagcagcatctgcgatgttataagcgtcgtcaaagcggggtcgatcttgtattgttatatattgtctaacacctataagattatcaaaatcttgtctgcttaatacaccgttaacaatttttgccttgaattcttttattggtgcattaataacatccttatagaggatgttaaacaaataagtgttatcaaagttaagatctggatatttcttttctgctagaacatccattgagtcggagccatctggtttaatataaccaccgataaatctagctctgtattctgtatccgtcaatctaatattaagaaggtgttgagtgaaaggtggaagatcgtaaaagctgtgagtattaatgataggattagtttccgaactaatgttaattggggtattaataatatctatatttccagcgttaagtgtaacattaaacagttttaattcacgtgacgtggtatcaattaaataattaatgcccaatttggatatagcagcctgaagctcatcttgtttagttacggatcctaatgagttattaagcaatatatcgaacggatgaacgaaggttgttttaagttggtcacatactttgtaatctagacatagatgcggaagaacggtagaaactatacgaaataaatattcagagtcctctaattgatcaagagtaactattgacttaataggcatcatttatttagtattaaatgacgaccgtaccagtgacggatatacaaaacgatttaattacagagttttcagaagataattatccatctaacaaaaattatgaaataactcttcgtcaaatgtctattctaactcacgttaacaacgtggtagatagagaacataatgccgccgtagtgtcatctccagaggaaatatcctcacaacttaatgaagatctatttccagatgatgattcaccggccactattatcgaacgagtacaacctcatactactattattgacgatactccacctcctacttttcgtagagagttattgatatcggaacaacgtcaacaacgagaaaaaagatttaatattacagtatcgaaaaatgctgaagcaataatggaatctagatctatgataacttctatgccaacacaaacaccatccttgggagtagtttatgataaagataaaagaattcagatgttggaggatgaagtggttaatcttagaaatcaacgatctaatacaaaatcatctgataatttagataattttaccaaaatactatttggtaagactccgtataaatcaacagaagttaataagcgtatagccatcgttaattatgcaaatttgaacgggtctcccttatcagtcgaggacttggatgtttgttcagaggatgaaatagatagaatctataaaacgattaaacaatatcacgaaagtagaaaacaaaaaattatcgtcactaacgtgattattattgtcataaacattatcgagcaagcattgctaaaactcggatttgaagaaatcaaaggactgagtaccgatatcacttcagaaattatcgatgtggagatcggagatgactgcgatgctgtagcatcaaaactaggaatcggtaacagtccggttcttaatattgtattgtttatactcaagatattcgttaaacgaattaaaattatttaatttaatacattcccatatccagacaacaatcgtctggattaatctgttcctgtcgtctcataccggacgacatattaatctttttattagtaggcatctttttagatggtttctttttcccagcattaactgagtcgatacctagaagatcgtgattgatctctccgaccattccacgaacttctaattggccgtctctaacggtaccataaactattttaccagcattagtaacagcttggacaatctgaccatccatcgcattgtacgatgtagtagtaactgttgttctacgtctaggagcaccagaagtatttttggagcccttggaggctgatgtagaagaagacgaggattttgattttggtttacatgtaatacattttgaactctttgattttgtatcacatgcgccggcagtcacatctgtttgagaattaagattattgttgcctcctttgacggctgcatctccaccgatttgcgctagtagatttttaagctgtggtgtaatcttattaactgtttcgatataatcatcgtaactgcttctaacggctaaattttttttatccgccatttagaagctaaaaatatttttatttatacagaagatttaactagattatacaatgaactaatatgatccttttccagattatttacaaacttggtattttttggttctggaggaggcgaatttaaattcggacttggattcggattttgtgagttcttgatcttattatacatcgagtataggatggcgacggtaactgctacacaaataccgatcaacaaaagaataccaatcatttattgacaataacttcactattgatcaagtatgcaatatatcatcttttcactaaataagtagtaataatgattcaacaatgtcgagatatatggacgataataatttagttcatggaaatatcgctatgattggtatgaatgactccgctaactctgtggggcgcgcagtgctttccccacatagaataaattagcattccgactgtgataataataccaagtataaacgccataatactcaatactttccatgtacgagtgggactggtagacttactaaagtcaataaaggcgaagatacacgaaagaatcaaaagaatgattccagcgattagcacgccggaaaaataatttccaatcataagcatcatgtccatttaactaataaaaattttaaatcgccgaatgaacaaagtggaatataaaccatataaaaacaatagtttgtactgcaaaaataatatctatttttgttttcgaagatatggtaaaattaaatagtagtacacagcatgttataactaacagcagcaacggctcgtaattacttatcatttactagacgaaaaggtggtgggatattttcttgctcaaataatacgaatatatcacccatccattttatgcgatgtttatatactctaatctttaatagatctatagacgacgggtttaccaacaatatagattttatcgattcatctaatttaaacccttccttaaacgtgaatgatctattatctggcataacgatgaccctacctgatgaatcggacaatgtactgggccatgtagaataaattatcaacgaattatcgtctacgaacatttatatcatttgttttaattttaggacgcgaataaatagatataaaatagaaaataacagatattacaaccagtgttatggccgcgcccaaccaggtaggcagttttattttatcttttactacaggttctcctggatgtacgtcaccaacggcggacgtagttctagtacaattagacgtaagttccgcttgggaattttttaacgctaaagagttaacgttaatcgtgcacccaacgtatttacatctagttctttgaacatcttgattataatataaccattttctatctctagattcgtcggtgcactcatgtaaccaacataccctaggtcctaaatatttatctccggaattagattttggataattcgcgcaccaacaatttctatttcctttatgatcgttacaaaagacgtataatgccgtatccccaaaagtaaaataatcaggacgaataattctaataaactcagaacaatatctcgcatccatatgtttggagcaaatatcggaataagtagacatagccggtttccgttttgcacgtaaccattctaaacaattggggtttccaggatcgtttctacaaaatccagtcatgaaatcgtcacaatgttctgtcttgtaattattattaaatatttttggacagtgtttggtatttgtcttagaacaacattttgccacgctatcactatcgcccaggagataatccttttttataaaatgacatcgttgcccggatgctatataatcagtagcgtgttttaaatccttaatatattcaggagttacctcgttctgataatagattaatgatccaggacgaaatttgaaagaactacatggttctccatgaattaatacatattgtttagcaaattcaggaactataaaactactacaatgatctatcgacataccatctatcaaacaaaacttgggtttaatttctcccggagatgtttcataatagtacgtataactttcttctgcaaacttaacagctctattatattcaggataattaaaacctaattccatatatttgtctcgtatatctgctattcctggtgctattttgattctattaagagtaacagctgcccccattcttaataatcgtcagtatttaaactgttaaatgttggtatatcaacatctaccttatttcccgcagtataaggtttgttgcaggtatactgttcaggaatggttacatttatacttcttctatagtcctgtctttcgatgttcatcacatatgcaaagaacagaataaacaaaataatgtaagaaataatattaaatatctgtgaattcgtaaatacattgattgccataataattacagcagctacaatacacacaatagacattcccacagtgttgccattacctccacgatacatttgagttactaagcaataggtaataactaagctagtaagaggcaatagaaaagatgagataaatatcatcaatatagagattagaggagggctatatagagccaagacgaacaaaatcaaaccgagtaacgttctaacatcattatttttgaagattcccaaataatcattcattcctccataatcgttttgcatcatacctccatctttaggcataaacgattgctgctgttcctctgtaaataaatctttatcaagcactccagcacccgcagagaagtcgtcaagcatattgtaatatcttaaataactcatttatatattaaaaaatgtcactattaaagatggagtataatctttatgccgaactaaaaaaaatgacttgtggtcaacccctaagtctttttaacgaagacggggatttcgtagaagttgaaccgggatcatcctttaagtttctgatacctaagggattttacgcctctccttccgtaaagacgagtctagtatttgaaacattaacaacgaccgataataaaatcactagtatcaatccaacaaatgcgccaaagttatatcctcttcaacgcaaagtcgtatctgaagtagtttctaatatgaggaaaatgatcgaatcaaaacgtcctctatacattactcttcacttggcgtgtggatttggtaagactattaccacgtgttatcttatggctacacacggtagaaaaaccgtcatttgcgtacccaataaaatgttaatacatcaatggaagacacaggtagaggcagtcggattggaacataagatatccatagatggagtaagtagtctattaaaggaactaaagactcaaagtccggatgtattaatagtagtcagtagacatctgacaaacgatgccttttgtaaatatatcaataagcattatgatttgttcatcttggatgaatcacatacgtataatctgatgaacaatacagcagttacaagatttttagcgtattatcctccgatgatgtgttattttttaactgctacacctagaccagctaaccgaatttattgtaacagtattattaatattgccaagttatccgatctaaaaaaaactatctatgcggtagatagtttttttgagccatattccacagacaatattagacatatggtaaaacgactagatggaccatctaataaatatcatatatataccgagaagttattatctgtagacgagcctagaaatcaacttattcttaataccctggtagaagaattcaagtcaggaactattaatcgcattttagttattactaaactacgtgaacatatggtattattctacaaacgattattagatcttttcggaccagaggttgtatttataggagacgcccaaaatagacgtactccagatatggtcaaatcaatcaaggaactaaatagatttatattcgtatccaccttattttattccggtactggtttagatattcctagtttggattcgttgttcatttgctcggcagtaatcaacaatatgcaaatagagcaattactagggagggtatgtcgagaaacagaactattagataggacggtatatgtatttcctaacacatccatcaaagaaataaagtacatgataggaaatttcatgcaacgaattattagtctgtctgtagataaactaggatttaaacaagaaagttatcggaaacatcaagaatccgatcccacttctgtatgtacaacatcctccagagaagaacgtgtattaaatagaatatttaactcgcaaaatcgttaagaagtttaagcgacgatccgcatgctgcgcaggccagtgtattacccctcatagtattaatataatccaatgatacttttgtgatgtcggaaatcttaaccaatttagactgacaggcagaacacgtcatgcaatcatcatcgtcatcgataactgtagtcttgggcttctttttgcggctcttcattccggaacgcacattggtgctatccatttaggtagtaaaaaataagtcagaatatgccctataacacgatcgtgcaaaacctggtatatcgtctctatctttatcacaatatagtgtatcgacatctttattattattgacctcgtttatcttggaacatggaatgggaacatttttgttatcaacggccacctttgccttaattccagatgttgtaaaattataactaaacagtctatcatcgacacaaatgaaattcttgtttagacgtttgtagtttacgtatgcggctcgttcgcgtctcattttttcagatattgcaggtactataatattaaaaataagaatgaaataacataggattaaaaataaagttatcatgacttctagcgctgatttaactaacttaaaagaattacttagtctgtacaaaagtttgaaattttcagattctgcggctatagaaaagtataattctttggtagaatggggaacatctacttactggaaaataggcgtgcaaaaggtagctaatgtcgagacgtcaatatctgattattatgatgaggtaaaaaataaaccgtttaatattgatccgggctattacattttcttaccggtatattttgggagcgtctttatttattcgaagggtaaaaatatggtagaacttggatctggaaactcttttcaaataccagatgatatgcgaagtgcgtgtaacaaagtattagacagcgataacggaatagactttctgagatttgttttgttaaacaatagatggataatggaagatgctatatcaaaatatcagtctccagttaatatatttaaactagctagtgagtacggattaaacatacccaaatatttagaaattgaaatagaggaagacacattatttgacgacgagttatactctattatagaacgctcttttgatgataaatttccaaaaatatccatatcgtatattaagttgggagaacttaggcggcaagttgtagactttttcaaattctcgttcatgtatattgagtccatcaaggtagatcgtataggagataatatttttattcctagcgttataacaaaatcaggaaaaaagatattagtaaaagatgtagaccatttaatacgatctaaggttagagaacatacatttgtaaaagtaaaaaagaaaaacacattttccattttatacgactatgatgggaacggaacagaaactagaggagaagtaataaaacgaattatagacactataggacgagactattatgttaacggaaagtatttctctaaggttggtagtgcaggcttaaagcaattgactaataaattagatattaatgagtgcgcaactgtcgatgagttagttgatgagattaataaatccggaactgtaaaacgaaaaataaaaaaccaatcagcatttgatttaagcagagaatgtttgggatatccagaagcagattttataacgttagttaataacatgcggttcaaaatagaaaattgtaaggttgtaaatttcaatattgaaaatactaattgtttaaataacccgagtattgaaactatatatggaaactttaaccagttcgtctcaatctttaatatcgtcaccgatgtcaaaaaaagattattcgagtgaaataatatgcgcctttgatataggtgcaaaaaatcctgccagaactgttttagaagtcaaggataactccgttagggtattggatatatcaaaattagactggagttctgattgggaaaggcgcatagctaaagatttgtcacaatatgaatacactacagttcttctagaacgtcagcctagaaggtcgccgtatgttaaatttatctattttattaaaggctttttatatcatacatcggctgccaaagttatttgcgtctcgcctgtcatgtctggtaattcatatagagatcgaaaaaagagatcggtcgaagcatttcttgattggatggacacattcggattgcgagactccgttccggatagacgcaaattagacgatgtagcggatagtttcaatttggctatgagatacgtattagataaatggaatactaattatacaccttataataggtgtaaatctagaaattacataaaaaaaatgtaataacgttagtaacgccattatggataatctatttacctttctacatgaaatagaagatagatatgccagaactatttttaactttcatctaataagttgcgatgaaataggagatatatatggtcttatgaaagaacgcatttcctcagaggatatgtttgataatatagtatataataaagatatacatcctgccattaagaaactagtgtattgcgacatccaacttactaaacacattattaatcagaatacgtatccggtatttaacgattcttcacaagtgaaatgttgtcattatttcgacataaactcagataatagcaatattagctctcgtacagtagagatatttgagagggaaaagtcatctcttgtatcatatattaaaactaccaataagaagagaaaggtcaattacggcgaaataaagaaaactgttcatggaggcactaatgcaaattacttttccggtaaaaagtctgacgagtatctgagtactacagttagatccaacattaatcaaccttggatcaaaaccatttctaagagaatgagagtagatatcattaatcactctatagtaacgcgtggaaaaagctctatattacaaactatagaaattatttttactaatagaacatgtgtgaaaatattcaaggattctactatgcacattattctatccaaggacaaggatgaaaaggggtgtatacacatgattgacaaattattctatgtctattataatttatttctgttgttcgaagatatcatccaaaacgagtactttaaagaagtagctaatgttgtaaaccacgtacttacggctacggcattagatgagaaattattcctaattaagaaaatggctgaacacgatgtttatggagttagcaatttcaaaatagggatgtttaacctgacatttattaagtcgttggatcataccgttttcccctctctgttagatgaggatagcaaaataaagttttttaaggggaaaaagctcaatattgtagcattacgatctctggaggattgtataaattacgtgactaaatccgagaatatgatagaaatgatgaaggaaagatcgactattttaaatagcatagatatagaaacggaatcggtagatcgtctaaaagaattgcttctaaaatgaaaaaaaacactgattcagaaatggatcaacgactagggtataagtttttggtgcctgatcctaaagccggagttttttatagaccgttacatttccaatatgtatcgtattctaattttatattgcatcgattgcatgaaatcttgaccgtcaagcggccactcttatcgtttaagaataatacagaacgaattatgatagaaattagcaatgttaaagtgactcctccagattactcacctataatcgcgagtattaaaggtaagagttatgatgcattagccacgttcactgtaaatatctttaaagaggtaatgaccaaagagggtatatccatcactaaaataagtagttatgagggaaaagattctcatttgataaaaattccgctactaataggatacgggaataaaaatccacttgatacagccaagtatcttgttcctaatgtcataggtggagtctttatcaataaacaatctgtcgaaaaagtaggaattaatctagtagaaaagattacaacatggccaaaatttagggttgttaagccaaactcattcactttctcgttttcctccgtatcccctcctaatgtattaccgacaagatatcgccattacaagatatctctggatatatcacaattggaagcgttgaatatatcatcgacaaagacatttataacggtcaatattgttttgctgtctcaatatttatctagagtgagtctagaattcattagacgtagtttatcatacgatatgcctccagaagttgtctatctagtaaacgcgataatagatagtgctaaacgaattactgaatctattactgactttaatattgatacatacattaatgacctggtggaagctgaacacattaaacaaaaatctcagttaacgatcaacgagttcaaatatgaaatgctgcataactttttacctcatatgaactatacacccgatcaactaaagggattttatatgatatctttactaagaaagtttctctactgtatctaccacacttctagatatccagatagagattcgatggtttgtcatcgcatcctaacgtacggcaaatattttgagacgttggcacatgatgaattagagaattacataggcaacatccgaaacgatatcatgaacaatcacaagaacagaggcacttacgcggtaaacattcatgtactaacaactcccggacttaatcacgcgttttctagcttattgagtggaaagttcaaaaagtcagacggtagttatcgaacacatcctcactattcatggatgcagaatatttctattcctaggagtgttggattttatccggatcaagtaaagatttcaaagatgttttctgtcagaaaataccatccaagtcaatatctttacttttgttcatcggacgttccggaaagaggtcctcaggtaggtttagtatctcaattgtctgtcttgagttccattacaaatatactaacgtctgagtatttggatttggaaaagaaaatttgtgagtatatcagatcatattataaagatgatataagttactttgaaacaggatttccaatcactatagaaaatgctctagtcgcatctcttaatccaaatatgatatgtgattttgtaactgactttagacgtagaaaacggatgggattcttcggtaacttggaggtaggtattactttagttagggatcacatgaatgaaattcgcattaatattggagcgggaagattagtcagaccattcttggttgtggataacggagagctcatgatggatgtgtgtccggagttagaaagcagattagacgacatgacattctctgacattcagaaagagtttccgcatgtcatcgaaatggtagatatagaacaatttacttttagtaacgtatgtgaatcggttcaaaaatttagaatgatgtcaaaggatgaaagaaagcaatacgatttatgtgactttcctgccgaatttagagatggatatgtggcatcttcattagtgggaatcaatcacaattctggacccagagctattcttggatgtgctcaagctaaacaagctatctcttgtctgagttcggatatacgaaataaaatagacaatggaattcatttgatgtatccagagaggccaatcgtgattagtaaggctttagaaacttcaaagattgcggctaattgcttcggccaacatgttactatagcattaatgtcgtacaaaggtatcaatcaagaggatggaattatcatcaaaaaacaatttattcagagaggcggtctcgatatagttaccgcaaagaaacatcaagtagaaattccgttggaaaactttaataacaaagaaagagataggtctaacgcctattcaaaattagaaagtaatggattagttagactgaatgctttcttggaatccggagacgctatggcacgaaatatctcatcaagaactcttgaagatgattttgctagagataatcagattagcttcgatgtttccgagaaatataccgatatgtacaaatctcgcgttgaacgagtacaagtagaacttactgacaaagttaaggtacgagtattaaccatgaaagaaagaagacccattctaggagataaatttaccactagaacgagtcaaaagggaacagtcgcgtatgtcgcggatgaaacggaacttccatacgacgaaaatggtatcacaccagatgtcattattaattctacatccatcttctctagaaaaactatatctatgttgatagaggttattttaacagccgcatattctgctaagccgtacaacaataagggagaaaaccgacctgtctgttttcctagtagtaacgaaacatccatcgatacatatatgcaattcgctaaacaatgttatgagcattcaaatccgaaattgtccgatgaagaattatcggataaaatcttttgtgaaaagattctctatgatcctgaaacggataagccttatgcatccaaagtattttttggaccaatttattacttgcgtctgaggcatttaactcaggacaaggcaaccgttagatgtagaggtaaaaagacgaagctcattagacaggcgaatgagggacgaaaacgtggaggaggtatcaagttcggagaaatggagagagactgtttaatagcgcatggcgcagccaatactattacagaagttttaaaagactcagaagaggattatcaagatgtgtatgtttgtgaaaattgtggagacatagcagcacaaatcaagggtattaatacatgtcttagatgttcaaaacttaatctctctcctctcttaacaaaaattgataccacgcacgtatctaaagtatttcttactcaaatgaacgccagaggcgtaaaagtcaaattagatttcgaacgaaggcctccttcgttttataaaccattagataaagttgatctcaagccgtcttttctggtgtaatattctagtttggtagtagatacatatcaatatcatcaaattcgagatccgaattataaaatgggcgtggattgttaactatagaatcggacgtctgatattcgaaaatctgtggagttttaggttttggtggaggtgtaactgctacttgggatactgaagtctgatattcagaaagctgggggatgttctggttcgacatccaccgatggtgtcacatcactaatcggttcggtaacgtctgtggatggaggtgctacttctacagaacctgtagcctcagttgtcaacggagatacatttttaatgcgaggaaatgtataatttggtaatggtttctcatgtggatctgaagaagaggtaagatatctactagaaagataccgatcacgttctagttctcttttgtagaacttaactttttctttctcagcatctagttgatattccaacctcttcacgttactacgttcagattccaattcacgttcgcatgggttacctccgcagtttttacgagcgatttcacgttcagccttcatgcgtctctccttctctctatcgagtttatcagagcagtctttctgaaggcgatcgaactccataaatttctccaacgctttgattgtttccatagatttccgaagttcagcttttaggactgtgattctttttctttcgaattcacagctggatgtgcaaccgtttccattaccgccatctctaagtttcttttctagatcggcaacatttcatccccatgccttttacattcctcgagtctactgtcgtcgaaatatcgttccagctccttttcgacatcaataactttagcacgttgtctctcaagctctcttttgtagttatctgattccctggcacgtttaagatcttcatgcaattgagtcagctcttaacacaatctcttgcttcttcgtcatagtacttacaatcactatgggatccattgttaccacgtctacactcggcgagctcgcgtttaagagattcaatttcccgtttgtattggtccatgtttccattgctaccaccattagatttacaggctgctagttgtcgttcgagatcagaaatacgggttttcttggaattgatttcgtcgatgtacttggcatcgaaacacttattaagttctttttccaattctacgattttatttctttcgcgagtcaattccctcctgtagtaactatctgttttgtcagattcacgctctctacgtagactttcttgcaagttactaatttgttccctagcacgtccgagtttagttttatatgctgaatagagttctgattcatcctttgagcagatctctagcgatcgtttaagattcctgattctagtctttagcctatttacctcctcagaagatgttccgttaccgttgcgtttacactcgttaagctgtctatcaagatccatgattctatctctaagacgttgcatctctctttccatatcagcattgctttcattattacgtctgcagtcactcaactgtctttcaatatctgagattctatctctaagacgtcgcatctctctctgtttcggcattggtttcattattacgtctacagtcgttcaactgtctttcaagatctgatattctagattggagtctgctaatctctgtagcattttcacggcattcactcagttgtctttcaagatctgagattttagattggagtctgctaatctctgtaagatttcctcctccgctctcgatgcagtcggtcaacttattctctagttctctaatacgcgaacgcagtgcatcaacttcttgcgtgtcttcctggttgcgtgtacattcatcgagtctagattcgagatctctaacgcgtcgtcgttcttcctcaagttctctgcgtactacagaaagcgtgtccctatcttgttgatatttagcaatttctgattctagagtactgattttgcttacgtagttactaatagttgtcttggccttatcaagatcctccttgtatttgtcgcattccttgatatccctacgaagtctggacagttcccattcgacattacgacgtttatcgatttcagctcggagatcgtcatcgcgttgttttagccacatacgactgagttcaagttctcgttgacaagatccatctacttttccattcctaatagtatccagttccttttctagttctgaacgcatttctcgttccctatcaagcgattctctcaattctcggatagtcttcttatcaatttctaataaatctgaaccatcatctgtcccattttgaatatccctgtgttctttgatctcttttgtaagtcggtcgattctttcggttttataaacagaatccctttccaaagtcctaatcttactgagtttatcactaagttctgcattcaattcggtgagttttctcttggcttcttccaactctgttttaaactctccactatttccgcattcttcctcgcatttatctaaccattcaattagtttattaataactagttggtaatcagcgattcctatagccgttcttgtaattgtgggaacataattaggatcttctaatggattgtatggcttgatagcatcatctttatcattattagggggatggacaaccttaattggttggtcctcatctcctccagtagcgtgtggttcttcaataccagtgttagtaataggcttaggcaaatgcttgtcgtacgcgggcacttcctcatccatcaagtatttataatcgggttctacgtctgaatattcttttctaagagacgcgacttcgggagttagtagaagaactctgtttctgtatctatcaacgctggaatcaatactcaagttaaggatagcgaatacctcatcgtcatcatccgtatcttctgaaacaccatcatatgacatttcatgaagtctaacgtattgataaatagaatcagatttagtattaaacagatccttaacctttttagtaaacgcatatgtatattttagatctccagatttcataatatgatcacatgccttaaatgtcagtgcttccatgatataatctggaacactaatgggtgacgaaaaagatacagcaccatatgctacgttgataaataaatctgaaccactaagtagataatgattaatgttaaggaagaggaaatattcagtatatagatatgccttagcatcatatcttgtactaaacacgctaaacagtttattgatgtgatcaatttccaacagaataattagagcagcgggaataccaacaaacatattaccacatccgtattttctatgaatatcacatatcatgttaaaaaatcttgatagaagagcgaatatctcgtctgacttaatgagtcgtagttcagcagcaacataagtcataactgtaaatagaacatactttcctgtagtgttgattctagactccacatcaacaccattattaaaaatagttttatatacatctttaatctgctctccgttaatcgtcgaacgttctagtatacggaaacactttgatttcttatctgtagttaatgacttagtgatatcacgaagaatattacgaattacatttcttgtttttcttgagagacctgattcagaactcaactcatcgttccatagtttttttacctcagtggcgaaatctttggagtgcttggtacatttttcaataaggttcgtgacctccatttattataaaaaattttattcaaaacttaactacaatcgggtaattataaaatcgtagatctcccatgtggtggaatactaccatctatcgcatgtggatggacagtaggtaatggccatgggaacagtaatgtttgcatatttatctttcttgccagtattactgcatattgtcccaatgtttcgatgtgatgttctaacctatcaactgccgctgtatcacaacaatagtgtccgatgaaattaagattatgatccaatgtgtttaatatatgattatcaagtcttatacgatccgcgtcttttttgacaggatcaggttcttctacaggaagaagtttcggcctcttatgatattcatgtctgggaaacggtggtctagggtgaggctccggtatcggagtgggttttggattataatcatcatcgtctatgacatcatcttcgacttcgatatttattttgctatcttgatgatgtcctgtatcagttgcattttcagcactcgactgaatattagcgcattcattgtctattattaccatatttctaaacccaaaatgtatgtgttgaacatcagtactatcgttgatgagtcttatagcatgaattcgcttatcgttatcgggtttatcttctgtcaccttagcaattccttttttattaaactctacataatcatatccatttctattgtttgttctaatataaacgagtatagcatcattgctaaatttttcaatagtatcgaaaacagaatatcctaaaccatataatatatattcagggacactcaaactaaatgtccaggattctcctaaatacgtaaactttaatagtgcgaaatcattcaaaaatctaccacttatagatagatagtacataaatgcgtatagtagtctacctatctctttattatgaaaaccggcattacgatcatatatgtcgtgatatacctgtgatccgtttacgttaaaccataaatacatgggtgatcctataaacatgaatttatttctaattctcagagctatagttaattgaccgtgtaatatttgcttacatgcatacttgatacgctcattaataaaatttttatcattgctcgttatctcagaatcgtatatataaggagtaccatcgtgattcttaccagatattatacaaaatactatatataaaatatattgaccaacgttagtaatcatataaatgtttaacgttttaaattttgtattcaatgatccattatcatacgctagcatggtcttatgatattcattctttaaaatataatattgtgttagccattgcattggggctcctaatggagattttttattctcatccattttaggataggctttcataaagtccctaataacttcgtgaataatgtttctatgttttctactgatgcatgtatttgcttcgatttttttatcccatgtttcatctatcatagatttaaacgcagtaatgctcgcaacattaacatcttgaaccgttggtacaattccgttccataaatttataatgttcgccatttatataactcattttttgaatatacttttaattaacaaaagagttaagttactcatatgggcgccgtccagtctgaacatcaatctttttagccagagatatcatagccgctcttagagtttcagcgtgattttccaacctaaatagaacttcatcgttgcgtttacaacacttttctatttgttcaaactttgttgttacattagtaatctttttttccaaattagttagccgttgtttgagagtttcctcattgtcgtcttcatcggctttaacaattgcttcgcgtttagcctctggctttttagcagcctttgtagaaaaaaattcagttgctggaattgcaagatcgtcatctccggggaaaagagttccgtccatttaaagtacagattttagaaactgacactctgcgttatttatatttggtacaacacatggattataaatatcgatgttaataacatcagaaaatgtaaagtctatacattgttgcatcgtgttaaattttctaatggatctagtattattgggtccaacttctgcctgaaatccaaatatggaagcggatacaaaaccgtttcctggataaaccacacatctccacttttgctttacatcagaaattgtgtcgttgacatcttgaactctcctatctaatgccggtgttccacctatagattttgaatattcgaatgctgcatgagtagcattaaattccttaatattgccataattttcatatattgagtaaccctggataaaaagtaaacacaccgcagccgtcgctaccacaataaaaaaaattgatagagagttcatttataatctattagaagctgacaaaatttttttacacgcatcagacaatgctttaataaatagttcaacatctacttttgtcatatcgaaccgatggtatgattctaacctagaattacatccgaaaaagttgactatgttcatagtcattaagtcattaacaaacaacattccagactctggattataagacgatactgtttcgtcacaattacctaccttaatcatgtgattatgaatattggctattagagcaccttctaagaaatctataatatctttgaaacacgatttaaaatcaaaccacgaatatacttctacgaagaaagttagtttacccataggagaaataactataaatggagatctaaatacaaaatccggatctatgatagttttaacattattatattctctattaaatacctccacatctaaaaatgttaattttgaaactatgtcttcgtttattaccgtacctgaactaaacgctataagctctattgtttgagaactctttaaacgatattcttgaaatacatgtaacaaagtttcctttaactcggtcggtttatctaccatagttacagaatttgtatccttatctataatataataatcaaaatcgtataaagttatataattatcgcgttcagattgggatcttttcaaatagactaaaaaccccatttctctagtaagtatcttatgtatatgtttgtaaaatatcttcatggtgggaatatgctctaccgcagttagccattcctcattgacagcggtagatgtattagacaaaactattccaatgtttaacaagggccattttacgagattattaaatccttgtttgataaatgtagccaatgagggttcgagttcaacgacgattgaattctcttcccgcggatgctgcatgatgaacgacgggatgttgttcgattgatttggaattctttttcgactttttgtttatattaaatattttaaaatttatagcggatagcaattcatgtaccacggataatgtagacgcgtattgcgcatcgatatctttattattagataaatttatcaataaatgtgagaagtttgcctcgttaaggtcttccatttaaatattatataaacatttgtgtttgtatcttattcgtcttttatggaatagttttttactagtaaagctgcaattacacactttgtccgtaaaacataaatataaacaccagcttttatcaatcgttccaaaaagtcgacggcggacatttttaacatggcatctattttaaatacacttaggtttttggaaaaaacatcattttataattgtaacgattcaataactaaagaaaagattaagattaaacataagggaatgtcatttgtattttataagccaaagcattctaccgttgttaaatacttgtctggaggaggtatatatcatgatgatttggttgtattggggaaggtaacaattaataatctaaagatgatgctattttacatggatttatcatatcatggagtgacaagtagtggagcaatttacaaattgggatcgtctatcgatagactttctctaaataggactattgttacaaaagttaataattatgatgatacattttttgacgacgatgattgatcgctattgcacaattttgtttttttactttctaatatagcgtttagattctttttcatgtgcgaatattgatttactaaaatatcgatgtttaacttttgttctatgacgtccttatcagcggtatcggtacatatacgtaattcaccttcacaaaatacggagtcttcgataataatagccaatcgattattggatctagctgtctgtatcatattcaacatgtttaatatatcctttcgtttcccctttacaggcatcgatcgtagcatattttccgcgtctgagatggaaatgttaaaactacaaaaatgcgtaatgttagcccgtcctaatattggtacgtgtctataagtttggcatagtagaataatagacgtgtttaaatgccttccaaagtttaagaattctattagagtattgcattttgatagtttatcacctacatcatcaaaaataagtaaaaagtgtgctgattttttatgattttgtgcgacagcaatacatttttctatgttacttttagttcgtatcagattatattctagagattcctgactactaacgaaattaatatgatttggccaaatgtatccatcataatctgggttataaacgggtgtaaacaagaatatatgtttatattttttaactagtgtagaaaacagagatagtaaatagatagtttttccagatccagatcctcccgttaaaaccattctaaacggcatttttaataaattttctcttgaaaattgtttttcttggaaacaattcataattatatttacagttactaaattaatttgataataaatcaaaatatggaaaactaaggtcgttagtagggaggagaacaaagaaggcacatcgtgacataaataacatttattatcatgatgacaccagaaaacgacgaagagcagacatctgtgttctccgctactgtttacggagacaaaattcaaggaaagaataaacgcaaacgcgtgattggtctatgtattagaatatctatggttatttcactactatctatgattaccatgtccgcgtttctcatagtgcgcctaaatcaatgcatgtctgctaacgaggctgctattactgacgccgctgttgccgttgctgctgcatcatctactcatagaaaggttgcgtctagcactacacaatatgatcacaaagaaagctgtaatggtttatattaccagggttcttgttatatattacattcagactaccagttattctcggatgctaaagcaaattgcactgcggaatcatcaacactacccaataaatccgatgtcttgattacctggctcattgattatgttgaggatacatggggatctgatggtaatccaattacaaaaactacatccgattatcaagattctgatgtatcacaagaagttagaaagtatttttgtgttaaaacaatgaactaatatttatttttgtacattaataaatgaaatcgcttaatagacaaactgtaagtaggtttaagaagttgtcggtgccggccgctataatgatgatactctcaaccattattagtggcataggaacatttctgcattacaaagaagaactgatgcctagtgcttgcgccaatggatggatacaatacgataaacattgttatttagatactaacattaaaatgtctacagataatgcggtttatcagtgtcgtaaattacgagccagattgcctagaccggatactagacatctgagagtattgtttagtattttttataaagattattgggtaagtttaaaaaagaccaatgataaatggttagatattaataatgataaagatatagatattagtaaattaacaaattttaaacaactaaacagtacgacggatgctgaagcgtgttatatatacaagtctggaaaactggttaaaacagtatgtaaaagtactcaatctgtactatgtgttaaaaaattctacaagtgacaacaaaaaatgaattaataataagtcgttaacgtacgccgccatggacgccgcgtttgttattactccaatgggtgtgttgactataacagatacattgtatgatgatctcgatatctcaatcatggactttataggaccatacattataggtaacataaaaactgtccaaatagatgtacgggatataaaatattccgacatgcaaaaatgctactttagctataagggtaaaatagttcctcaggattctaatgatttggctagattcaacatttatagcatttgtgccgcatacagatcaaaaaataccatcatcatagcatgcgactatgatatcatgttagatatagaagataaacatcagccattttatctattcccatctattgatgtttttaacgctacaatcatagaagcgtataacctgtatacagctggagattatcatctaatcatcaatccttcagataatctgaaaatgaaattgttgtttaattcttcattctgcatatcagacggcaatggatggatcataattgatgggaaatgcaatagtaattttttatcataaaagttgtaaagtaaataataaaacaataaatattgaactagtagtacgtatattgagcaatcagaaatgatgctggtacctcttatcacggtgaccgtagttgcgggaacaatattagtatgttatatattatatatttgtaggaaaaagatacgtactgtctataatgacaataaaattatcatgacaaaattaaaaaagataaagagttctaattccagcaaatctagtaaatcaactgatagcgaatcagactgggaggatcactgtagtgctatggaacaaaacaatgacgtagataatatttctaggaatgagatattggacgatgatagcttcgctggtagtttaatatgggataacgaatccaatgtcatggcgcctagcacagaacacatttacgatagtgttgctggaagcacgctgctaataaataatgatcgtaatgaacagactatttatcagaacactacagtagtaattaatgagacggagactgttgaagtacttaatgaagataccaaacagaatcctaactattcatccaatcctttcgtaaattataataaaaccagtatttgtagcaagtcaaatccgttcattacagaactcaacaataaatttagtgagaataatccgtttagacgagcacatagcgatgattatcttaataagcaagaacaagatcatgaacacgatgatatagaatcatcggtcgtatcattggtgtgattagtttcctttttataaaattgaagtaatatttagtattattgctgccgtcacgttgtacaaatggagatattccctgtattcggcatttctaaaattagcaattttattgctaataatgactgtagatattatatagatacagaacatcaaaaaattatatctgatgagatcaatagacagatggatgaaacggtacttcttaccaacatcttaagcgtagaagttgtaaatgacaatgagatgtaccatcttattccccatagactatcgactattatactctgtattagttctgtcggaggatgtgttatctctatagataatgacatcaatgacaaaaatattctaacatttcccattgatcatgctgtaatcatatccccactgagtaaatgtgtcgtagttagcaagggtcctacaaccatattggttgttaaagcggatatacccagcaaacgattggtaacatcgtttacaaacgacatactgtatgtaaacaatctgtcactgattaattatttgccgttgtctgtattcattattagacgagtcaccgactatttggatagacacatatgcgatcagatatttgcgaataataagtggtattccattataaccatcgacgataagcaatatcctattccatcaaactgtataggtatgtcctctgccaagtacataaattctagcatcgagcaagatactttaatacatgtttgtaacctcgagcatccattcgacttagtatacaaaaaaatgcagtcgtacaattctgtacctatcaaggaacaaatattgtacggtagaattgataatataaatatgagcattagtatttctgtggattaatagatttctagtatggggatcattaatcatctctaatctctaaatacctcataaaacgaaaaaaaagctattatcaaatactgtacggaatggattcattctcttctctttttatgaaactctgttgtatatctactgataaaactggaagcaaaaaatctgataaaaagaataagaataagatcaaggattatatggaacacgattattataaaataacaatagttcctggttcctcttccacgtctactagctcgtggtattatacacatgcctagtaatagtctctttgcgttgacggaaagcagactagaaataacaggctaaaatgttcagacaccataatagttcccaacccagataataacagagtaccatcaacacattcctttaaactcaatcccaaacccaaaaccgttaaaatgtatccggccaattgatagtagataatgaggtgtacagcgcatgataatttacacagtaaccaaaatgaaaatactttagtaattataagaaatatagatggtaacgtcatcatcaacaatccaataatatgccggagagtaaacattgacggataaaacaaaaatgctccgcataactctatcatggcaataacacaaccaaatacttgtaagattcctaaattagtagaaaatacaacggatatcgatgtataagtgatctcgagaaataataagaataaagtaatgcccgtaaagataaacatcaacattgtttggtaatcattaaaccaattagtatgaagttgaactaatttcacagtagattttattccagtgttatcctcgcatgtatacgtacctggtaagatatctttatattctataatcaatgagacatcactatccgataacgaatgaagtctagcactagtatgccatttacttaatatggtcgtcttggaagttttattataagttaaaatatcatggttgtccaatttccatctaatatactttgtcggattatctatagtacacggaataatgatggtattattacatgctgtatactctatagtctttgtagatgttataatcataaaagtacagaggtatatcaacgatattctaactcttgacattttttatttatttaaaatgatacctttgttatttattttattctattttgctaacggtatcgaatggcataagtttgaaacgagtgaagaaataatttctacttacttattagacgacgtattatacacgggtgttaatggggcggtatacacattttcaaataataaactaaacaaaactggtttagctaatactaattatatcacaacatctataaaagtagaggatgcggataaggatacattagtatgcggaaccaataacggaaatcccaaatgttggaaaatagacggttcagacgacccaaaacatagaggtagaggatacgctccttatcaaaatagcaaagtaacgataatcagtcacaacggatgtgtactatctgacataaacatatcaaaagaaggaattaaacgatggagaagatttgacggaccatgtggttatgatttatacacggcggataacgtaattccaaaagatggtttacgaggagcattcgtcgataaagatggtacttatgacaaagtttacattcttttcactgatactatcggctcaaagagaattgtcaaaattccgtatatagcacaaatgtgcctaaacgacgaaggtggtccatcatcattgtctagtcatagatggtcgacgtttctcaaagtcgaattagaatgtgatatcgacggaagaagttatagacaaattattcattctagaactataaaaacagataatgatacgatactatatgtattcttcgatagtccgcattatgtacctattctatgaataccattaaacaatctttttctacgtcaaaattggaaggatatacaaagcaattgccgtctccagctcctggtatatgtctaccagctggaaaagttgttccacataccacgtttgaagtcatagaaaaatataatgtactagatgatattataaagcctttatctaaccaacctatcttcgaaggaccgtctggtgttaaatggttcgatataaaggagaaggaaaatgaacatcgggaatatagaatatacttcataaaagaaaattctatatattcgttcgatacaaaatctaaacaaactcgtagctcgcaagtcgatgcgcgactattttcagtaatggtaacttcgaaaccgttatttatagcagatatagggataggagtaggaatgccacaaatgaaaaaaatacttaaaatgtaatcttaatcgagtacaccacacgacaatgaacaaacataagacagattatgctggttatgcttgctgcgtaatatgcggtctaattgttggaattatttttacagcgacactattaaaagttgtagaacgtaaattagttcatacaccatcaatagataaaacgataaaagatgcatatattagagaagattgtcctactgactggataagctataataataaatgtatccatttatctactgatcgaaaaacctgggaggaaggacgtaatgcatgcaaagctctaaatccaaattcggatctaattaagatagagactccaaacgagttaagttttttaagaagcattagacgcggatattgggtaggagaatccgaaatattaaaccagacaaccccatataattttatagctaagaatgccacgaagaatggaactaaaaaacggaaatatatttgtagcacaacgaatactcccaaactgcattcgtgttacactatataacaattacactacatttttatcataccactacttcggttagatgttttagaaaaaaataaatatcgccgtaccgttcttgtttttataaaaataacaattaacaattatcaaattttttctttaatattttacgtggttgaccattcttggtggtaaaataatctcttagtgttggaatggaatgctgtttaatgtttccacactcatcgtatattttgacgtatgtagtcacatcgtttacgcaatagtcagactgtagttctatcatgcttcctacattagaaggaggaacagttttaaagtctcttggttttaatctattaccgttagttttcatgaaatcctttgttttatccacttcacattttaaataaatgtccactatacattcttctgttaattttactagatcgtcatgggtcatagaatttataggttccgtagtccatggatccaaactagcaaacttcgcgtatacggtatcgcgattagtgtatacaccaactgtatgaaaattaagaaaacagtttaatagatcaacagaaatatttaatcctccgtttgatacagatgcaccatatttatggattttggattcacacgttgtttgtctgaggggttcgtctagcgttgcttctacataaacttctattcccatatattctttattgtcagaatcgcataccgatttatcatcatacactgtttgaaaactaaatggtatacacatcaaaataacaaatactaacgagtacattctgcaatattgttatcgtaattggaaaaatagtgttcgagtgagttggattatgtgagtattggattgtatattttattttatattttgtaataagaataaaatgctaatgtcaagtttattccaatagatgtcttattaaaaacatatataataaataacaatggctgaatggcataaaattatcgaggatatctcaaaaaataataagttcgaggatgccgccatcgttgattacaagactacaaagaatgttctagctgctattcctaacagaacatttgccaagattaatccgggtgaaattattcctctcatcactaatcgtaatattctaaaacctcttattggtcagaaatattgtattgtatatactaactctctaatggatgagaacacgtatgctatggagttgcttactgggtacgcccctgtatctccgatcgttatagcgagaactcataccgcacttatatttttgatgggtaagccaacaacatccagacgtgacgtgtatagaacgtgtagagatcacgctacccgtgtacgcgcaactggtaattaaaataaaaagtaatattcatatgtagtgtcaattttaaatgatgatgatgaaatggataatatccatattgacgatgtcaataatgccggtattggcatacagctcatcgatttttagatttcattcagaggatgtggaattatgttatgggcatttgtattttgataggatctataatgtagtaaatataaaatataatccgcatattccatatagatataattttattaatcgcacgttaaccgtagatgaactagacgataatgtcttttttacacatggttattttttaaaacacaaatatggttcacttaatcctagtttgattgtctcattatcaggaaacttaaaatataatgatatacaatgctcagtaaatgtatcgtgtctcattaaaaatttggcaacgagtacatctactatattaacatctaaacataagacttattctctacatcggtccacgtgtattactataataggatacgattctattatatggtataaagatataaatgacaagtataatggcatctatgattttactgcaatatgtatgctaatagcgtctacattgatagtgaccatatacgtgtttaaaaaaataaaaatgaactcttaattatgctatgctattagaaatggataaaatcaaaattacggttgattcaaaaattggtaatgttgttaccatatcgtataacttggaaaagataactattgatgtcacacctaaaaagaaaaaagaaaaggatgtattattagcgcaatcagttgctgtcgaagaggcaaaagatgtcaaggtagaagaaaaaaatattatcgatattgaagatgacgatgatatggatgtagaaagcgcataatacgatctataaaaataagtatataaatactttttatttactgtactcttactgtgtagtggtgataccctactcgattatttttttaaaaaaatacttattctgattcttctagccatttccgtgttcgttcgaatgccacatcgacgttaaagataggggagtagttgaaatctagttctgcattgttggtacgcacctcaaatgtagtgttggatatcttcaacgtatagttgttgagtagtgatggttttctaaatagaattctcttcatatcattcttgcacgcgtacatttttagcatccatcttggaattctagatccttgttctattcccaatggtttcatcaatagaagattaaacatatcgtacgaacacgatggagagtaatcgtagcaaaagtaagcatttcctttaatctcagatcccggatactggatatattttgcagccaacacgtgcatccatgcaacatttcctacatatacccggctatgcaccgcgtcatcatcgactgtacgatacataatgttaccgtgttgcttacattgctcgtaaaagactttcgtcaatttgtctccttctccgtaaattccagtgggtcttaggcaacaagtatacaattttgctccattcatgattacggaattattggctttcataaccagttgctcggccatacgtttactttttgcgtatacatgtcctggtgatatatcataaagggtatgctcatggccgatgaatggatcaccgtgtttatttggtcctattgcttccatgctactagtatagatcaaatacttgattcctaggtccacacaagctgccaatatagtctgtgttccataatagtttactttcatgatttcattatcggtgtattttccaaatacatccactagagcagccgtatgaataatcagatttaccccatctagcgcttctctcaccttatcaaagtcgtttatatcacattgtatatagtttataaccttaactttcgaggttattggttgtggatcttctacaatatctatgactctgatttcttgaacatcatctgcactaattaacagttttactatatacctgcctagaaatccggcaccaccagtaaccgcgtacacggccattgctgccactcataatatcagactacttattctattttactaaataatggctgtttgtataatagaccacgataatatcagaggagttatttactttgaaccagtccatggaaaagataaagttttaggatcagttattggattaaaatccggaacgtatagtttgataattcatcgttacggagatattagtcaaggatgtgattccataggcagtccagaaatatttatcggtaacatctttgtaaacagatatggtgtagcatatgtttatttagatacagatgtaaatatatctacaattattggaaaggcgttatctatttcaaaaaatgatcagagattagcgtgtggagttattggtatttcttacataaatgaaaagataatacattttcttacaattaacgagaatggcgtttgatatatcagttaatgcgtctaaaacaataaatgcattagtttacttttctactcagcaaaataaattagtcatacgtaatgaagttaatgatacacactacactgtcgaatttgatagggacaaagtagttgacacgtttatttcatataatagacataatgacaccatagagataagaggggtgcttccagaggaaactaatattggttgcgcggttaatacgccggttagtatgacttacttgtataataagtatagttttaaactgattttagcagaatatataagacacagaaatactatatccggcaatatttattcggcattgatgacactagatgatttggctattaaacagtatggagacattgatctattatttaatgagaaacttaaagtagactccgattcgggactatttgactttgtcaactttgtaaaggatatgatatgttgtgattctagaatagtagtagctctatctagtctagtatctaaacattgggaattgacaaataaaaagtataggtgtatggcattagccgaacatatatctgatagtattccaatatctgagctatctagactacgatacaatctatgtaagtatctacgcggacacactgagagcatagaggataaatttgattattttgaagacgatgattcgtctacatgttctgccgtaaccgacagggaaacggatgtataattttttttatagcgtgaaggatatgataaaaaatataattgttgtatttatcccattccaatcaccttatatgattctgtaacacaatgaaggagtctcatagatgtatagaggtcagatactggtttgataaactgtttattccacatgagtatgtttgactttatggttagacccgcatactttaacaaatcactgaaaattggagttaggtattgacctctcagaatcagttgccgttctggaacattaaatgtattttttatgatatactccaacgcatttatgtgggcatacaacaagtcattactaatggagtattccaagagttttagttgtctagtatttaacaagagaagagatttcaacagactgtttatgaactcgaatgccgcctcattgtcgcttatattgatgatgtcgaattctcccaatatcatcaccgatgagtagctcatcttgttatcgggatccaagttttctaaagatgtcattaaaccctcgatcatgaatggatttatcatcatcgtttttatgttggacatgagcttagtccgtttgtccacatctatagacgacgatttctgaattattttatatatccctctctttaactccaggaacttgtcaggatggtctactttaatatgttctcgtctaagagatgaaaatctttggatggttgcacgcgacttttctctaaaggatgacgttgcccaagatcctctcttaaatgaatccatcttatccttggacaagatggacagtctattttccttagatggtttaatatttttgttacccatgatctataaaggtagacctaatcgtctcggatgacctatatatttattttcagttttattatacgcataaattgtaaaaaatatgttaggtttacaaaaatgtctcgtggggcattaatcgtttttgaaggattggacaaatctggaaaaacaacacaatgtatgaacatcatggaatctataccggcaaacacgataaaatatcttaactttcctcagagatccactgtcactggaaagatgatagatgactatctaactcgtaaaaaaacctataatgatcatatagttaatctattattttgtgcaaatagatgggagtttgcatcttttatacaagaacaactagaacagggaattactttaatagttgatagatacgcgttctctggagtagcgtatgccgccgctaaaggcgcgtcaatgactctcagtaagagttatgaatctggattgcctaaacccgacttagttatattcttggaatctggtagcaaagaaattaatagaaacgtcggcgaggaaatttatgaagatgttacattccaacaaaaggtattacaagaatataaaaaaatgattgaagaaggagatattcattggcaaattatttcttctgaattcgaggaagatgtaaagaaggagttgattaagaatatagttatagaggctatacacacggttactggaccagtggggcaactgtggatgtaatagtgaaattacattttttataaatagatgttagtacagtgttataaatggatgaagcatattactctggcaacttggaatcagtactcggatacgtgtccgatatgcataccgaactcgcatcaatatctcaattagttattgccaagatagaaactatagataatgatatattaaacaaggacattgtaaattttatcatgtgtagatcaaacttggataatccatttatctctttcctagatactgtatatactattatagatcaagagaactatcagaccgaattgattaattcattagacgacaatgaaattatcgattgtatagttaataagtttatgagcttttataaggataacctagaaaatatagtagatgctatcattactctaaaatatataatgaataatccagattttaaaactacgtatgccgaagtactcggttccagaatagccgatatagatattaaacaagtgatacgtgagaatatactacaattgtctaatgatatccgcgaacgatatttgtgaaaaatattaaaaaaaaatactttttttattaaatgacgtcgcttcgcgaatttagaaaattatgctgtgatatatatcacgcatcaggatataaagaaaaatctaaattaattagagactttataacagatagggatgataaatatttgatcattaagctattgcttcccggattagacgatagaatttataacatgaacgataaacaaattataaaattatatagtataatatttaaacaatctcaggaagatatgctacaagatttaggatacggatatataggagacactattaggactttcttcaaagagaacacagaaatccgtccacgagataaaagcattttaactttagaagacgtggatagtttcttaactacgttatcatccgtaactaaagaatcgcatcaaataaaattattgactgatatcgcatccgtttgtacatgtaatgatttaaaatgtgtagtcatgcttattgataaagatctaaaaattaaagcgggtcctcggtacgtacttaacgctattagtcctaatgcctatgatgtgtttagaaaatctaataacttgaaagagataatagaaaatgcatctaaacaaaatctagactctatatctatttctgttatgactccaattaatcccatgttagcggaatcgtgtgattctgtcaataaggcgtttaaaaaatttccatcaggaatgtttgcggaagtcaaatacgatggtgaaagagtacaagttcataaaaataataacgagtttgccttctttagtagaaacatgaaaccagtactctctcataaagtggattatctcaaagaatacataccgaaagcatttaaaaaagctacgtctatcgtattggattctgaaattgttcttgtagacgaacataatgtaccgctcccgtttggaagtttaggaatacacaaaaagaaagaatataaaaactctaacatgtgtttgttcgtgtttgactgtttgtactttgatggattcgatatgacggacattccattgtacgaacgaagatcttttctcaaagatgttatggttgaaatacccaatagaatagtattctcagagttgacgaatattagtaacgagtctcagttaactgacgtattggatgatgcactaacgagaaaattagaaggattggtcttaaaagatattaatggagtatacgaaccgggaaagagaagatggttaaaaataaagcgagactatttgaacgagggttccatggcagattctgccgatttagtagtactaggtgcttactatggtaaaggagcaaagggtggtatcatggcagtctttctaatgggttgttacgacgatgaatccggtaaatggaagacggttaccaagtgttcaggacacgatgataatacgttaagggttttgcaagaccaattaacgatggttaaaattaacaaggatcccaaaaaaattccagagtggttggtagttaataaaatctatattcccgattttgtagtagaggatccgaaacaatctcagatatgggaaatttcaggagcagagtttacatcttccaagtcccataccgcaaatggaatatccattagatttcctagatttactaggattagagaagataaaacgtggaaagaatctactcatctaaacgatttagtaaacttgactaaatcttaatagttacatacaaactgaaaattaaaataacactatttagttggtggtcgccatggatggtgttattgtatactgtctaaacgcgttagtaaaacatggcgaggaaataaatcatataaaaaatgatttcatgattaaaccatgttgtgaaagagtttgtgaaaaagtcaagaacgttcacattggcggacaatctaaaaacaatacagtgattgcagatttgccatatatggataatgcggtatccgatgtatgcaattcactgtataaaaagaatgtatcaagaatatccagatttgctaatttgataaagatagatgacgatgacaagactcctactggtgtatataattattttaaacctaaagatgttattcctgttatcatatctataggaaaggataaagatgtctgtgaactattaatctcatcagacatatcgtgtgcatgcgtggagttaaattcatatcacgtagccattcttcccatggatgtttccttttttaccaaaggaaatgcatcattgattattctcctgtttgatttctctatcgatgcagcacctctcttaagaagtgtaaccgataataatgttattatatctagacaccagcgtctacatgacgagcttccgagttccaattggttcaagttttacataagtataaagtccgactattgttctatattatatatggttgttgatggatctgtgatgcatgcgatagctgataatagaactcacgcaattattagcaaaaatatattagacaatactacgattaacgatgagtgtagatgctgttattttgaaccacagattaggattcttgatagagatgagatgctcaatggatcatcgtgtgatatgaacagacattgtattatgatgaatttacctgatgtaggcaaatttggatctagtatgttggggaaatatgaacctgacatgattaagattgctctttcggtggctggtaatttaataagaaatcgagactacattcccgggagacgaggatatagctactacgtttacggtatagcctctagataatttttttaagcacgaaataaaaaacataattttaaaccaatctatttcatactattttgtgtgatcaccatggacataaagatagatattagtatttctggtgataaatttacggtgactactaggagggaaaatgaagaaagaaaaaaatatctacctctccaaaaagaaaaaactactgatgttatcaaacctgattatcttgagtacgatgacttgttagatagagatgagatgtttactattctagaggaatattttatgtacagaggtctattaggcctcagaataaaatatggacgactctttaacgaaattaaaaaattcgacaatgatgcggaagaacaattcggtactatagaagaactcaagcagaaacttagattaaattctgaagagggagcagataactttatagattatataaaggtacaaaaacaggatatcgtcaaacttactgtatacgattgcatatctatgataggattgtgtgcatgcgtggtagatgtttggagaaatgagaaactgttttctagatggaaatattgtttacgagctattaaactgtttattaatgatcacatgcttgataagataaaatctatactgcagaatagactagtatatgtggaaatgtcatagaaagttaaaagttaatgagagcaaaaatatataaggttgtattccatatttgttattttttctgtaatagttagaaaaatacattcgatggtctatctaccagattattatgtgttataaggtactttttctcataataaactagagtatgagtaagatagtgtttttcaaaacatataaatctaaaattgatggatgagatatacagctattaatttcgaaaatatattttaatctgataactttaaacatggatttttgatggtggtttaacgttttaaaaaaagattttgttattgtagtatatgataatattaaaagatggatataaagaatttgctgactgcatgtactattttttacattactacattggctacggcagatatacctactccgccaccaacgggtcatgtgacaagggagaatatcttgataagaggcataatcaatgttgtaatcggtgtccacctggagaatttgccaaggttagatgtaatggtaacgataacacaaaatgtgaacgctgcccacctcatacatataccacaatcccaattattctaatggatgtcatcaatgtagaaaatgcccaaccggatcatttgataaggtaaagtgtaccggaacacagaacagtaaatgttcgtgtcttcctggttggtattgtgctactgattcttcacagactgaagattgttgaaattgtgtaccaaaaaggagatgtccatgcggatactttggtggaatagatgaacaaggaaatcctatttgtaaatcgtgttgtgttggtgaatattgcgactacctacgtaattatagacttgatccatttcctccatgcaaactatctaaatgtaattaattatgattttgatgataatgttaccatacattatatcgctacttggttagtgtattattcagtatgaagacctattaataattacttatcttttgacgatcttgttataattataatataaaaatacttatggcatagtaactcataattgctgacgcgataaattcgtaataatctgttttgttcaaatttttataaggaatctacaggcataaaaataaaaatataatttataatatactcttacagcgcgccatcatgaataacagcagtgaattgattgctgttattaatggatttagaaatagtggacgattttgtgatattagtatagttattaatgatgaaaggataaacgctcataaactcatcctatctggagcctccgaatatttttccattctgttttccaataattttatcgattctaatgaatacgaagttaatctaagtcatttagattatcaaagcgttaacgatttgatcgattacatttatgggatacctttgagcctaactaacgataacgtgaaatatattctttcaaccgctgattttttacaaattggatctgctattacggagtgtgaaaattacatacttaaaaatctttgttctaaaaactgtatcgatttctacatatacgctgataaatataataacaagaaaatagaatcagcgtcgtttaacacaatattacaaaatattttgagactcatcaacgatgaaaactttaaatacttaacagaggaatcaatgataaaaattttaagcgatgatatgttaaatataaaaaatgaggattttgcaccactaattctcattaaatggttagagagtactcaacaatcatgcaccgtcgagttacttagatgcctcagaatatcattgctttccccacaagttataaaatcactttatagtcatcaactggttagttcaatctacgaatgtataacattcttaaacaatatagcattcttggatgaatcatttcctagataccatagcatcgagttgatatctatcggtataagtaattcgcatgataagatttccataaactgctacaatcataaaaaaaatacatgggaaatgatatcttcacgtagatataggtgtagtttcgcagtggccgtcctggataatattatctatatgatgggtggatatgatcagtccccgtatagaagttcaaaggttatagcgtacaatacatgtacaaattcttggatatatgatataccagagctaaaatatcctcgttctaattgtgggggactggctgatgacgaatacatttattgtataggcggcatacgcgatcaggattcatcgttgacatctagtattgataaatggaagccatcaaaaccatattggcagaagtatgctaaaatgcgcgaaccaaaatgtgatatgggggttgcgatgttaaacggattaatatatgtcatgggtggaatcgttaaaggtgacacgtgtaccgacgcactagagagtttatcagaagatggatggatgaagcatcaacgtcttccaataaaaatgtccaatatgtcgacgattgttcatgatggcaagatttatatatctggaggttacaacaatagtagtgtagttaatgtaatatcgaatctagtccttagctataatccgatatatgatgaatggaccaaattatcatcattaaacattcctagaattaatcccgctctatggtcagcgcataataaattatatgtaggaggaggaatatctgatgatgttcgaactaatacatctgaaacatacgataaagaaaaagattgttggacattggataatggtcacgtgttaccacgcaattatataatgtataaatgcgaaccgattaaacataaatatccattggaaaaaacacagtacacgaatgattttctaaagtatttggaaagttttataggtagttgatagaacaaaatacataattttgtaaaaataaatcactttttatactaatatgacacgattaccaatacttttgttactaatatcattagtatacgctacaccttttcctcagacatctaaaaaaataggtgatgatgcaactctatcatgtaatcgaaataatacaaatgactacgttgttatgagtgcttggtataaggagcccaattccattattcttttagctgctaaaagcgacgtcttgtattttgataattataccaaggataaaatatcttacgactctccatacgatgatctagttacaactatcacaattaaatcattgactgctagagatgccggtacttatgtatgtgcattctttatgacatcaactacaaatgacactgataaagtagattatgaagaatactccacagagttgattgtaaatacagatagtgaatcgactatagacataatactatctggatctacacattcaccggaaactagttctaagaaacctgattatatagataattctaattgctcgtcggtattcgaaatcgcgactccggaaccaattactgataatgtagaagatcatacagacaccgtcacatacactagtgatagcattaatacagtaagtgcatcatctggagaatccacaacagacgagactccggaaccaattactgataaagaagatcatacagttacagacactgtctcatacactacagtaagtacatcatctggaattgtcactactaaatcaaccaccgatgatgcggatctttatgatacgtacaatgataatgatacagtaccaccaactactgtaggcggtagtacaacctctattagcaattataaaaccaaggactttgtagaaatatttggtattaccgcattaattatattgtcggccgtggcaattttctgtattacatattatatatataataaacgttcacgtaaatacaaaacagagaacaaagtctagatttttgacttacataaatgtctgggatagtaaaatctatcatattgagcggaccatctggtttaggaaagacagccatagccaaaagactatgggaatatatttggatttgtggtgtcccataccactagatttcctcgtcctatggaacgagaaggtgttgattaccattacgttaacagagaggccatctggaagggaatagccgccggaaactttctagaacatactgagtttttaggaaatatttacggaacttctaaaacagctgtgaatacagcggctattaataatcgtatttgtgtgatggatctaaacatcgacggtgttagaagtcttaaaaatacgtacctaatgccttactcggtgtatataagacctacctctcttaaaatggttgagaccaagcttcgttgtagaaacactgaagctaacgatgagattcatcgtcgcgtgatattggcaaaaacggatatggatgaggccaacgaagcaggtctattcgacactattatcattgaagatgatgtgaatttagcatatagtaagttaattcagatactacaggaccgtattagaatgtattttaacactaattagagacttaagacttaaaacttgataattaataatataactcgtttttatatgtggctatttcaacgtctaatgtattagttaaatattaaaacttaccacgtaaaacttaaaatttaaaatgatatttcattgacagatagatcacacattatgaactttcaaggacttgtgttaactgacaattgcaaaaatcaatgggtcgttggaccattaataggaaaaggtggattcggtagtatttatactactaatgacaataattatgtagtaaaaatagagcccaaagctaacggatcattatttaccgaacaggcattttatactagagtacttaaaccatccgttatcgaagaatggaaaaaatctcacaatataaagcacgtaggtcttatcacgtgcaaggcatttggtctatacaaatccattaatgtggaatatcgattcttggtaattaatagattaggtgcagatctagatgcggtgatcagagccaataataatagattaccaaaaaggtcggtgatgttgatcggaatcgaaatcttaaataccatacaatttatgcacgagcaaggatattctcacggagatattaaagcgagtaatatagtcttggatcaaatagataagaataaattatatctagtggattacggattggtttctaaattcatgtctaatggagaacatgttccatttataagaaatccaaataaaatggataacggtactctagaatttacacctatagattcgcataaaggatacgttgtatctagacgtggagatctagaaacacttggatattgtatgattagatggttgggaggtatcttgccatggactaagatatctgaaacaaagaattgtgcattagtaagtgccacaaaacagaaatatgttaacaatactgcgactttgttaatgaccagtttgcaatatgcacctagagaattgctgcaatatattaccatggtaaactctttgacatattttgaggaacccaattatgacgagtttcggcacatattaatgcagggtgtatattattaagtgtggtgtttggtcgatgtaaaatttttgtcgataaaaattaaaaaataacttaatttattattgatctcgtgtgtacaaccgaaatcatggcgatgttttacgcacacgctctcggtgggtacgacgagaatcttcatgcctttcctggaatatcatcgactgttgccaatgatgtcaggaaatattctgttgtgtcagtttataataacaagtatgacattgtaaaagacaaatatatgtggtgttacagtcaggtgaacaagagatatattggagcactgctgcctatgtttgagtgcaatgaatatctacaaattggagatccgatccatgatcaagaaggaaatcaaatctctatcatcacatatcgccacaaaaactactatgctctaagcggaatcgggtacgagagtctagacttgtgtttggaaggagtagggattcatcatcacgtacttgaaacaggaaacgctgtatatggaaaagttcaacatgattattctactatcaaagagaaggccaaagaaatgaatgcacttagtccaggacctatcattgattaccacgtctggataggagattgtatctgtcaagttactgctgtggacgtacatggaaaggaaattatgagaatgagattcaaaaagggtgcggtgcttccgatcccaaatctggtaaaagttaaacttggggagaatgatacagaaaatctttcttctactatatcggcggcaccatcgaggtaaccacctctctggaagacagcgtgaataatgtactcatgaaacgtttggaaactatacgccatatgtggtctgtcgtatatgatcattttgatattgtgaatggtaaagaatgctgttatgtgcatacgcatttgtctaatcaaaatcttataccgagtactgtaaaaacaaatttgtacatgaagactatgggatcatgcattcaaatggattccatggaagctctagagtatcttagcgaactgaaggaatcaggtggatggagtcccagaccagaaatgcaggaatttgaatatccagatggagtggaagacactgaatcaattgagagattggtagaggagttcttcaatagatcagaacttcaggctggtgaatcagtcaaatttggtaattctattaatgttaaacatacatctgtttcagctaagcaactaagaacacgtatacggcagcagcttcctttatactctcatcttttaccaacacaaagggtggatatttgttcattggagttgataataatacacacaaagtaattggattcacggtgggtcatgactacctcagactggtagagaatgatatagaaaagcatatcaaaagacttcgtgttgtgcatttctgtgagaagaaagaggacatcaagtacacgtgtcgattcatcaaggtatataaacctggggatgaggctacctcgacatacgtgtgcgctatcaaagtggaaagatgctgttgtgctgtgtttgcagattggccagaatcatggtatatggatactaatggtatcaagaagtattctccagatgaatgggtgtcacatataaaattttaattaatgtaatagagaacaaataataaggttgtaatatcatatagacaataactaacaattaattagtaactgttatctcttttttaactaaccaactaactatatacctattaatacatcgtaattatagttcttaacatctattaatcattaattcgcttctttaattttttataaactaacattgttaattgaaaagggataacatgttacagaatataaattatatatggatttttttaaaaaggaaatacttgactggagtatatatttatctcttcattatatagcacgcgtgttttccaatttttccacatcccatataatacaggattataatctcgttcgaacatacgagaaagtggataaaacaatagttgattttttatctaggttgccaaatttattccatattttagaatatggggaaaatattctacatatttattctatggatgatgctaatacgaatattataattttttttctagatagagtattaaatattaataagaacgggtcatttatacacaatctcaggttatcatcatccattaatataaaagaatatgtatatcaattagttaataatgatcatccagataataggataagactaatgcttgaaaatggacgtagaacaagacattttttgtcctatatatcagatacagttaatatctatatatgtattttaataaatcatggattttatatagatgccgaagacagttacggttgtacattattacatagatgtatatatcactataagaaatcagaatcagaatcatacaatgaattaattaagatattgttaaataatggatcagatgtagataaaaaagatacgtacggaaacacaccttttatcctattatgtaaacacgatatcaacaacgtggaattgtttgagatatgtttagagaatgctaatatagactctgtagactttaatagatatacacctcttcattatgtctcatgtcgtaataaatatgattttgtaaagttattaatttctaaaggagcaaatgttaatgcgcgtaatagattcggaactactccattttattgtggaattatacacggtatctcgcttataaaactatatttggaatcagacacagagttagaaatagataatgaacatatagttcgtcatttaataatttttgatgctgttgaatctttagattatctattatccagaggagttattgatattaactatcgtactatatacaacgaaacatctatttacgacgctgtcagttataatgcgtataatacgttggtctatctattaaacagaaatggtgattttgagacgattactactagtggatgtacatgtatttcggaagcagtcgcaaacaacaacaaaataataatggaagtactattgtctaaacgaccatctttgaaaattatgatacagtctatgatagcaattactaaacataaacagcataatgcagatttattgaaaatgtgtataaaatatactgcgtgtatgaccgattatgatactcttatagatgtacagtcgctacagcaatataaatggtatattttaaaatgtttcgatgaaatagatatcatgaagagatgttatataaaaaataaaactgtattccaattagttttttgtatcaaagacattaatactttaatgagatacggtaaacatccttctttcgtgaaatgcactagtctcgacgtatacggaagtcgtgtacgtaatatcatagcatctattagatatcgtcagagattaattagtctattatccaagaagctggatcctggagataaatggtcgtgttttcctaacgaaataaaatataaaatattggaaaactttaacgataacgaactatccacatatctaaaaatcttataaacactattaaaatataaaatctaagtaggataaaatcacactacatcattgtttccttttagtgctcgacagtgtatactatttttaacactcataaataaaaatgaaaacgatttccgttgttacgttgttatgcgtactacctgctgttgtttattcaacatgtactgtacccactatgaataacgctaaattaacgtctaccgaaacatcgtttaatgataaacagaaagttacgtttacatgtgatcagggatatcattcttcggatccaaatgctgtctgcgaaacagataaatggaaatacgaaaatccatgcaaaaaaatgtgcacagtttctgattacatctctgaattatataataaaccgctatacgaagtgaattccaccatgacactaagttgcaacggcgaaacaaaatattttcgttgcgaagaaaaaaatggaaatacttcttggaatgatactgttacgtgtcctaatgcggaatgtcaacctcttcaattagaacacggatcgtgtcaaccagttaaagaaaaatactcatttggggaatatatgactatcaactgtgatgttggatatgaggttattggtgcttcgtacataagttgtacagctaattcttggaatgttattccatcatgtcaacaaaaatgtgatatgccgtctctatctaatggattaatttccggatctacattttctatcggtggcgttatacatcttagttgtaaaagtggttttacactaacggggtctccatcatccacatgtatcgacggtaaatggaatcccgtactcccaatatgtgtacgaactaacgaagaatttgatccagtggatgatggtcccgacgatgagacagatttgagcaaactctcgaaagacgttgtacaatatgaacaagaaatagaatcgttagaagcaacttatcatataatcatagtggcgttaacaattatgggcgtcatatttttaatctccgttatagtattagtttgttcctgtgacaaaaataatgaccaatataagttccataaattgctaccgtaaatataaatccgttaaaataatgaataattaataacgaacaagtatcaaaagattaaagaattatagctagaatcaattgagatgtcttcttcagtggatgttgatatctacgatgccgttagagcatttttactcaggcactattataacaagagatttattgtgtatggaagaagtaacgccatattacataatatatacaggctatttacaagatgcgccgttataccgttcgatgatatagtacgtactatgccaaatgaatcacgtgttaaacaatgggtgatggatacacttaatggtataatgatgaatgaacgcgatgtttctgtaagcgttggcaccggaatactattcatggaaatgtttttcgattacaataaaaatagtatcaacaatcaactaatgtatgatataattaatagcgtatctataattctagctaatgagagatatagaagcgcttttaacgacgatggtatatacatccgtagaaatatgattaacaagttgtacggatacgcatctctaactactattggcacgatcgctggaggtgtttgttattatctgttgatgcatctagttagtttgtataaataattatttcaatatactagttaaaattttaagattttaaatgtataaaaaactaataacgtttttatttgtaataggtgcattagcatcctattcgaataatgagtacactccgtttaataaactgagtgtaaaactctatatagatggagtagataatatagaaaattcatatactgatgataataatgaattggtgttaaattttaaagagtacacaatttctattattacagagtcatgcgacgtcggatttgattccatagatatagatgttataaacgactataaaattattgatatgtataccattgactcgtctactattcaacgcagaggtcacacgtgtagaatatctaccaaattatcatgccattatgataagtacccttatattcacaaatatgatggtgatgagcgacaatattctattactgcagagggaaaatgctataaaggaataaaatatgaaataagtatgatcaacgatgatactctattgagaaaacatactcttaaaattggatctacttatatatttgatcgtcatggacatagtaatacatattattcaaaatatgatttttaaaaatttaaaatatattatcacttcagtgacagtagtcaaataacaaacaacaccatgagatatattataattctcgcagttttgttcattaatagtatacacgctaaaataactagttataagtttgaatccgtcaattttgattccaaaattgaatggactggggatggtctatacaatatatcccttaaaaattatggcatcaagacgtggcaaacaatgtatacaaatgtaccagaaggaacatacgacatatccgcatttccaaagaatgatttcgtatctttctgggttaaatttgaacaaggcgattataaagtggaagagtattgtacgggactatgcgtcgaagtaaaaattggaccaccgactgtaacattgactgaatacgacgaccatatcaatttgtacatcgagcatccgtatgctactagaggtagcaaaaagattcctatttacaaacgcggtgacatgtgtgatatctacttgttgtatacggctaacttcacattcggagattctaaagaaccagtaccatatgatatcgatgactacgattgcacgtctacaggttgcagcatagactttgtcacaacagaaaaagtgtgcgtgacagcacagggagccacagaagggtttctcgaaaaaattactccatggagttcgaaagtatgtctgacacctaaaaagagtgtatatacatgcgcaattagatccaaagaagatgttcccaatttcaaggacaaaatggccagagttatcaagagaaaatttaataaacagtctcaatcttatttaactaaatttctcggtagcacatcaaatgatgttaccacttttcttagcatgcttaacttgactaaatattcataactaatttttattaatgatacaaaaacgaaataaaactgcatattatacactggttaacgcccttataggctctaaccattttcaagatgaggtccctgattatagtccttctgttcccctctatcatctactccatgtctattagacaatgtgagaagactgaagaggaaacatggggattgaaaatagggttgtgtataattgccaaagatttctatcccgaaagaactgattgcagtgttcatctcccaactgcaagtgaaggattgataactgaaggcaatggattcagggatatacgaaacaccgataaattataaaaaaagcaatgtgtccgctgtttccgttaataatactattttcgtaactggcggattattcataaataactctaatagcacgatcgtggttaacaatatggaaaaacttgacatttataaagacaaacaatggtcgattatagaaatgcctatggctagggtatatcacggcatcgactcgacatttggaatgttatattttgccggaggtctatccgttaccgaacaatatggtaatttagagaaaaacaacgagatatcttgttacaatcctagaacgaataagtggtttgatatttcatatactatttataagatatccatatcatcattgtgtaaactaaataacgtcttctatgtatttagtaaggacattggatatgtggaaaagtatgatggtgcatggaagttagtacatgatcgtctccccgctataaaggcattatcaacttctccttattgattgaaaatgaaaatataaatagtttttatgtatagcagtattaccctatagttttattgcttactactaacatggatacagatgttacaaatgtagaagatatcataaatgaaatagatagagagaaagaagaaatactaaaaaatgtagaaattgaaaataataaaaacattaacaagaatcatccaagtggatatattagagaagcactcgttattaataccagtagtaatagtgattccattgataaagaagttatagaatgtatctgtcacgatgtaggaatatagatcatatctactaatttttataatcgatacaaaacataaaaaacaactcgttattacatagcaggcatggaatccttcaagtattgttttgataacgatggcaagaaatggattatcggaaatactttatattctggtaattcaatactatataaggtcagaaaaaatttcactagttcgttctacaattacgtaatgaagatagatcacaaatcacacaagccattgttgtctgaaatacgattctatatatctgtattggatcctttgactatcgacaactggacacgggaacgtggtataaagtatttggctattccagatctgtatggaattggagaaaccgatgattatatgttcttcgttataaagaatttgggaagagtattcgccccaaaggatactgaatcagtcttcgaagcatgcgtcactatgataaacacgttagagtttatacactctcaaggatttacccatggaaaaatagaaccgaggaatatactgattagaaataaacgtctttcactaattgactattctagaactaacaaactatacaagagtggaaactcacatatagattacaacgaggacatgataacttcaggaaatatcaattatatgtgtgtagacaatcatcttggagcaacagtttcaagacgaggagatttagaaatgttgggatattgcatgatagaatggttcggtggcaaacttccatggaaaaacgaaagtagtataaaagtaataaaacaaaaaaaagaatataaaaaatttatagctactttctttgaggactgttttcctgaaggaaatgaacctctggaattagttagatatatagaattagtatacacgttagattattctcaaactcctaattatgacagactacgtaaactgtttatacaagattgaaattatattcttttttttatagagtgtggtagtgttacggatatttaatattagactatctctatcgcgctacacgaccaatatcgattactatggatatcttcagggaaatcgcatcttctatgaaaggagagaatgtattcatttctccagcgtcaatctcgtcagtattgacaatactgtattatggagctaatggatccactgctgaacagctatcaaaatatgtagaaaaggaggagaacatggataaggttagcgctcaaaatatctcattcaaatccataaataaagtatatgggcgatattctgccgtgtttaaagattcctttttgagaaaaattggcgataagtttcaaactgttgacttcactgattgtcgcactatagatgcaatcaacaagtgtgtagatatctttactgaggggaaaatcaatccactattggatgaaccattgtctcctgatacctgtctcctagcaattagtgccgtatactttaaagcaaaatggttgacgccattcgaaaaggaatttaccagtgattatcccttttacgtatctccgacggaaatggtagatgtaagtatgatgtctatgtacggcaaggcatttaatcacgcatctgtaaaggaatcattcggcaacttttcaatcatagaactgccatatgttggagatactagtatgatggtcattcttccagacaagattgatggattagaatccatagaacaaaatctaacagatacaaattttaagaaatggtgtaactctctggaagctacgtttatcgatgttcacattcccaagtttaaggtaacaggctcgtataatctggtggatactctagtaaagtcaggactgacagaggtgttcggttcaactggagattatagcaatatgtgtaattcagatgtgagtgtcgacgctatgatccacaaaacgtatatagatgtcaatgaagagtatacagaagcagctgcagcaacttgtgcactggtgtcagactgtgcatcaacaattacaaatgagttctgtgtagatcatccgttcatctatgtgattaggcatgttgatggaaaaattcttttcgttggtagatattgctctccgacaactaattgttaaccattttttttaaaaaatagaaaaaacatgtggtattagtgcaggtcgttattcttccaattgcaattggtaagatgacggccaactttagtacccacgtcttttcaccacagcactgtggatgtgacagactgaccagtattgatgacgtcagacaatgtttgactgaatatatttattggtcgtcctatgcataccgcaacaggcaatgcgctggacaattgtattccacactcctctcttttagagatgatgcggaattagtgttcatcgacattcgcgagctggtaaaaaatatgccgtgggatgatgtcaaagattgtgcagaaatcatccgttgttatataccggatgagcaaaaaaccatcagagagatttcggccatcatcggactttgtgcatatgctgctacttactggggaggtgaagaccatcccactagtaacagtctgaacgcattgtttgtgatgcttgagatgctcaattacgtggattataacatcatattccggcgtatgaattgatgagttgtacatcttgacattttcttctttcttctcttctccctttcccagaaacaaactttttttacccactataaaataaaatgagtatactacctgttatatttctttctatatttttttattcttcattcgttcagacttttaacgcgcctgaatgtatcgacaaagggcaatattttgcatcattcatggagttagaaaacgagccagtaatcttaccatgtcctcaaataaatacgctatcatccggatataatatattagatattttatgggaaaaacgaggagcggataatgatagaattataccgatagataatggtagcaatatgctaattctgaacccgacacaatcagactctggtatttatatatgcattaccacgaacgaaacctactgtgacatgatgtcgttaaatttgacaatcgtgtctgtctcagaatcaaatatagatcttatctcgtatccacaaatagtaaatgagagatctactggcgaaatggtatgtcccaatattaatgcatttattgctagtaacgtaaacgcagatattatatggagcgggcatcgacgccttagaaataagagacttaaacaacggacacctggaattattaccatagaagatgttagaaaaaatgatgctggttattatacatgtgttttagaatatatatacggtggcaaaacatataacgtaaccagaattgtaaaattagaggtacgggataaaataataccttctactatgcaattaccagatggcattgtaacttcaataggtagtaatttgactattgcatgcagagtatcgttgagacctcccacaacggatgcagacgtcttttggataagtaatggtatgtattacgaagaagatgatggggacggaaacggtagaataagtgtagcaaataaaatctatatgaccgataagagacgtgttattacatcccggttaaacattaatcctgtcaaggaagaagatgctacaacgtttacgtgtatggcgtttactattcctagcatcagtaaaacagttactgttagtataacgtgaatgtatgttgttacatttccatgtcaattgagtttataagaatttttatacattatcttccaacaagcaattgacgaacgtattgctatgattaactcccacgatactatgcatattattaatcattaacttgcagactatacctagagctattttgacatactcgtgttcttgtgtaattgcagtatctatattattaaagtacgtaaatctagctatagttttattatttaattttagataatataccgtctccttatttttaaaaattgccacatcctttattaaatcatgaatgggaatttctatgtcatagttaatatattgtgaacaacaagagcagatatctataggaaagggtggaatgcgatacattgatctatgtagttttaaaacacacgcaaactttgaagaatttatataaatcattccatcgatacatccttctatgttgagatgtatatatccaggaattcgtttattaatatcgggaaatgtataaactaaaacattgcccggaagcggagcttctaccggagttatatcagtttttaacttacaaaatgtaaccaatacctttgcatgacttgttttgttcggcaacgttagtttaaacttgacgaatggattaattacaatagcatgatccgcgcatctattaagtttttttactttaacgcccttgtatgtttttacagagactttatctaaatttctagtgcttgtatgtgttataaatataacgggatatagaactgaatcacctaccttagatacccaattacattttatcagatccagataataaacaaattttgtcgccctaactaattctatattgttatatattttacaattggttatgatatcatgtaataacttggaatctaacgcacatcgtcgtacgtttatacaattgtgatttagtgtagtatatctacacatgtatttttccgcgctatagtattctggactagtgataaaactatcgttatatctgtcttcaatgaactcatcgagatattgctctctgtcatattcatacacctgcataaactttctagacatcttacaatccgtgttattttaggatcatatttacatatttacgggtatatcaaagatgttagattagttaatgggaatcgtctataataatgaatattaaacaattatatgaggacttttaccacaaagcatcataaaaatgagtcgtcgtctgatttatgttttaaatatcaaccgcgaatcaactcataaaatacaagagaatgaaatatatacatattttagtcattgcaatatagaccatacttctacagaacttgattttgtagttaaaaactatgatctaaacagacgacaacctgtaactgggtatactgcactacactgctatttgtataataattactttacaaacgatgtactgaagatattattaaatcatggagtggatgtaacgatgaaaaccagtagcggacgtatgcctgtttatatattgcttactagatgttgcaatatttcacatgatgtagtgatagatatgatagacaaagataaaaaccacttattacatagagactattccaacctattactagagtatataaaatctcgttacatgttattaaaggaagaggatatcgatgagaacatagtatccactttattagataagggaatcgatcctaactttaaacaagacggatatacagcgttacattattattatttgtgtctcgcacacgtttataaaccaggtgagtgtagaaaaccgataacgataaaaaaggccaagcgaattatttctttgtttatacaacatggagctaatctaaacgcgttagataattgtggtaatacaccattccatttgtatcttagtattgaaatgtgtaataatattcatatgactaaaatgctgttgacttttaatccgaatttcgaaatatgtaataatcatggattaacgcctatactatgttatataacttccgactacatacaacacgatattcttgttatgttaatacatcactatgaaacaaatgttggagaaatgccgatagatgagcgtcgtataatcgtattcgagtttatcaaaacatattctacacgtcctgcagattcgataacttatttgatgaataggtttaaaaatatagatatttatacccgctatgaaggaaagacattattacacgtagcatgtgaatataataatacacacgtaatagattatcttatacgtatcaacggagatataaatgcgttaaccgacaataacaaacacgctacacaactcattatagataacaaagaaaattccccatataccattaattgtttactgtatatacttagatatattgtagataagaatgtgataagatcgttggtggatcaacttccatctctacctatcttcgatataaaatcatttgagaaattcatatcctactgtatacttttagatgacacattttacaatagacacgttaggaatcgcgattctaaaacgtatcgatacgcattttcaaaatacatgtcgtttgataaatacgatggtataataactaaatgtcataaagaaacaatattgctcaaactatccactgttctagacactacactatatgcagttttaagatgccataattcgaaaaagttaagaagatacctcaccgagttaaaaaaatataataacgataagtcctttaaaatatattctaatattatgaatgagagataccttaatgtatattataaagatatgtacgtgtcaaaggtatatgataaactatttcctgttttcacagataaaaattgtctactaacattactaccttcagaaattatatacgaaatattatacatgctgacaattaacgatctttataatatatcgtatccacctaccaaagtatagttgtatttttctcatgcgatgtgtgtaaaaaaactgatattatataaatattttagtgccgtataataaagatgacgatgaaaatgatggtacatatatatttcgtatcattattgttattgctattccacagttacgccatagacatcgaaaatgaaatcacagaattcttcaataaaatgagagatactctaccagctaaagactctaaatggttgaatccagcatgtatgttcggaggcacaatgaatgatatagccgctctaggagagccattcagcgcaaagtgtcctcctattgaagacagtcttttatcgcacagatataaagactatgtggttaaatgggaaaggctagaaaaaaatagacggcgacaggtttctaataaacgtgttaaacatggtgatttatggatagccaactatacatctaaattcagtaaccgtaggtatttgtgcaccgtaactacaaagaatggtgactgtgttcagggtatagttagatctcatattagaaaacctccttcatgcattccaaaaacatatgaactaggtactcatgataagtatggcatagacttatactgtggaattctttacgcaaaacattataataatataacttggtataaagataataaggaaattaatatcgacgacattaagtattcacaaacgggaaaggaattaattattcataatccagagttagaagatagcggaagatacgactgttacgttcattacgacgacgttagaatcaagaatgatatcgtagtatcaagatgtaaaatacttacggttataccgtcacaagaccacaggtttaaactaatactagatccaaaaatcaacgtaacgataggagaacctgccaatataacatgcactgctgtgtcaacgtcattattgattgacgatgtactgattgaatgggaaaatccatccggatggcttataggattcgattttgatgtatactctgttttaactagtagaggcggtattaccgaggcgaccttgtactttgaaaatgttactgaagaatatataggtaatacatataaatgtcgtggacacaactattattttgaaaaaacccttacaactacagtagtattggagtaaatatacaatgcatttttatatacattactgaataattattattattatttatatcgtatttgtgctataacgcgactatctaggtatttgtatctcaccgatagagaacatataaatgtagactctattaaacagttgtgtaaaatatcagatcctaatgcatgttatagatgtggatgtacggctttacatgagtacttttataattatagatcagtcaacggaaaatacaagtatagatacaacggttactatcaatattatttatctagcgattatgaaaattataatgaatattattatgatgattatgatagaactggtatgaacagtgagagtgataatatatcaatcaaaacagaatatgaattctatgatgaaacacaagatcaaagtacacaactagtaggttacgacattaaactcaaaaccaatgaggatgattttatggctatgatagatcagtgggtgtccatgattatatagatgaatcaattaataaagtagtatatggaagagagtctcacgtaagatggcgggatatatggcaagaacataatgatggcgtatacagtataggaaaggagtgcatagataatatatacgaagacaaccataccgtagacgaattctacaagatagacagcgtatcagatgtagatgacgcggaacacatatctccgataactaatgatgtatctacacaaacatgggaaaagaaatcagagttagatagatacatggaaatgtatcctcgtcatagatatagtaagcattctgtctttaagggattttctgacaaagttagaaaaaatgatttagacatgaatgtggtaaaagaattactttctaacggtgcatctctaacaattaaggatagcagtaataaggatccaataaccgtttattttcgaagaacgataatgaatttagaaatgattgatgaacgaaagtatatagtacactcctatctaaaaaattataaaaatttcgattatccatttttcaggaagttagttttgactaataaacattgtctcaacaattattataatataagcgacagcaaatatggaacaccgctacatatattggcgtctaataaaaaattaataactcctaattacatgaagttattagtgtataacggaaatgatataaacgcacgaggtgaagatacacaaatgcgaactccattacacaaatatttgtgtaaatttgtatatcataatattgaatatggtatccgatactataatgaaaagattatagacgcatttatagagttaggagccgatctaactattccaaatgacgatggaatgataccagtagtttactgtatacactcaaatgccgaatatggttataacaatattactaacataaagataatacgtaaactacttaatcttagtagacgtgcgtcacataatctatttagagatcgagtcatgcacgattatataagtaatacatatattgatcttgagtgtttagatattattagatcgttggatggattcgatatcaatggttactttgaaggacgtacaccacttcattgcgctatacaacataacttcactcagattgctaagtacttattagatcgaggagctgatatagtcgtacccaacacattgattatacatcagtacatacagtaaatagcatagatatggaggaggatacaaatatttcaaataaagttataaggtacaacactgtcaataatatatgggaaacattacctaacttctggactggaactataaatccaggcgtggtctcgcataaagatgatatatatgttgtatgcgacatcaaagatgaaaaaaatgttaaaacttgtatatttagatataacacgaatacgtataacggatgggaattggtcacgacgacagaaagcagattatcagctctgcatactattctttataacaataccataatgatgttacattgttatgaatcgtatatgttacaagatacatttaatgtgtacactcgcgaatggaatcatatgtgtcatcaacattcgaatagttatatcatgtacaatatactacccatctactaaatataatagaataaaataaatgagtatgatcattttagataacgattgattttatcattaccgcttcattcttatattctttgcttacggaacctatatttagaaacatctactaacgattttttatgcttgcattattaatggtatgtaatatgattgattgtgtacgcaataccaatttgttaagtatgaatacggggtacaaacataaactgaagtttaacattatttatttatgatatatatcgttattgtttggtctataccatggatatctttaaagaactaatcttaaaacacacggatgaaaatgttttgatttctccagtttctattttatctactttatctattctaaatcatggagcagctggttctacagctgaacaactatcaaaatatatagagaatatgaatgagaatacacccgatgacaataatgacatggacgtagatattccgtattgtgcgacactagctaccgcaaataaaatatacggtagcgatagtatcgagttccacgcctccttcctacaaaaaataaaagacgattttcaaactgtaaactttaataatgctaaccaaacaaaggaactaatcaacgaatgggttaagacaatgacaaatggtaaaattaattccttattgactagtccgctatccattaatactcgtatgacagttgttagcgccgtccattttaaagcaatgtggaaatatccattttctaaacatcttacatatacagacaagttttatatttctaagaatatagttaccagtgttgatatgatggtgagcactgagaataacttgcaatatgtacatattaatgaattattcggaggattctctattatcgatattccatacgagggaaactctagtatggtaattatactaccggacgacatagaaggtatatataacatagaaaaaaatataacagatgaaaaatttaaaaaatggtgtggtatgttatctactaaaagtatagacttgtatatgccaaagtttaaagtggaaatgacagaaccgtataatctggtaccgattttagaaaatttaggacttactaatatattcggatattatgcagattttagcaagatgtgtaatgaaactatcactgtagaaaaatttctacatacgacgtttatagatgttaatgaggagtatacagaagcatcggccgttacaggagtatttatgactaacttttcgatggtatatcgtacgaaggtctacataaaccatccattcatgtacatgattaaagacaacacaggacgtatactttttatagggaaatactgctatccgcaataaatataaacaaatagacttttatcacgtttatctatgtctaaatattacaaatagtaatagtataaactaaagctgataatacttaaaaaaataataatatcatttacaattaatagtataaactaaaaattaaacaaatcgttattataagtaatatcaaaatgatgatatacggattaatagcgtgtcttatattcgtgacttcatccatcgctagtccactttatattcccgttattccacccatttcggaagataaatcgttcaatagtgtagaggtattagtttccttgtttagagatgaccaaaaagactatacggtaacttctcagttcaataactacactatcgataccaaagactggactatcggcgtactatccacacctgatggtttggatataccattgactaatataacttattggtcacggtttactataggtcgtgcattgttcaaatcagagtctgaggatattttccaaaagaaaatgagtattctaggtgtttctatagaatgtaagaagtcgtcgacattacttacttttttgaccgtgcgtaaaatgactcgagtatttaataaatttccagatatggcttattatcgaggagactgtttaaaagccgtttatgtaacaatgacttataaaaatactaaaactggagagactgattacacgtacctctctaatggggggttgcctgcatactatcgtaatggggtcgatggttgattattgattagtatattccttattctttttattcacacaaaaagaacatttttataaacatgaaaccactgtctaaatgtaattatgatcttgatttatagatgaagatcagcctttagaggattttaaccagtatgtttaatatgaaaaaaataaacataacatattttgagattaagcgctattgtgcaagattatattagaatcaaattaatctttcatacgagaaaaataacgacatacgtcgtcaacaaattaaactttttatttattagttaactagcttatagaacttgctcattgttatgtttctaaaacgggtacgacatataggacaattatccgacgcaccggtttctcttcgtgttttatgccatatattgatgcatgttatgcaaaatatatgagtacacgaatccaataaaccaaagtatctatcgttttgagtaaacaacttcatagcaaattccacattctttttctttacttactctatacacgtcctcgtatttatccagtattttgatgatatccaactcagaaatggttgttgtattattgggtgtattgggagtataggtattattagctatgtaccaatttaccaaccctcttaatattgattgaacaatcacatcggttatccaatcaataaccacattaataactaaattgtagtgtatatatagaccatatatgtttctatttttttgacagttacgtatagtttcagtaagttttgattgttgtattcctgtatctctagataagttagtcatatagtcccttccggcgatacgttttttccaagcccgaaattgattagccaaatgtgtatttatttttgtgatattgatataatatgtaatgttattaatatttcggataatgcatactgttagtcttatatcatttggttcatctatgtattgtaatattgttacatgatctatagatgatgtattgattttggcaggatcgaattccatatccgcgactaaacagtgaaaaaaatgtaaatactttttaaattttaaattagtaaaacttttttttattttttatgattccaaaaatactgaatacaaagtcctaaattataaatatggagatcatactaccacaacttattattatgcatactcagccggtgtaatagatagatatatataattctattacaccggcagacaattaccgatcggtatttgtcgttaccaacataccgtataatatgtaatatacaattccataacccattgacagttgttatacatcaaaattgcaattcttttgattacgatgttataagaatgtagttaattgatgtatgatgttaatgtgtcctctttcctcttataacatcgtaatcaaaaacttttttataatatatacctaataatgtgtcttaatagttctcgtgattcgtcaaacaatcattcttataaaatataataaagcaacgtaaaacacataaaaataagcgtaactaataagacaatggatatttacgacgataaaggtctacagactattaaactgtttaataatgaatttgattgtataaggaatgacatcagagaattatttaaacatgtaactgattccgatagtatacaacttccgatggaagacaattctgatattatagaaaatatcagaaaaatactatatagacgattaaaaaatgtagaatgtgttgacatcgatagtacaataacttttatgaaatacgatccaaatgatgataataagcgtacgtgttctaattgggtacccttaactaataactatatggaatattgtctagtaatatatttggaaacaccgatatgtggaggcaaaataaaattataccaccctacaggaaatataaagtcggataaggatattatgtttgcaaagactctagactttaaatcaaagaaagtgttaactggacgtaaaacaattgccgttctagacatatccgtttcatataatagatcaatgactactattcactacaacgacgacgttgatatagatatacatactgataaaaatggaaaagagttatgttattgttatataacaatagatgatcattacttggttgatgtggaaactataggagttatagtcaatagatctggaaaatgtctgttagtaaataaccatctaggtataggtatcgttaaagataaacgtataagcgatagttttggagatgtatgtatggatacaatatttgacttttctgaagcacgagagttattttcattaactaatgatgataacaggaatatagcatgggacactgataaactagacgatgatacagatatatggactcccgtcacagaagatgattacaaatttctttctagactagtattgtatgcaaaatctcaatcggatactgtattcgactattatgttcttactggtgatacggaaccacccactgtattcattttcaaggtaactagattttactttaatatgccgaaataaaaaatttttgtataatatctagaggtagaggtattgtttagataaatacaaataacatagatacatcgcatacttagcatttttataaatatacataagacatacactttatacattttttttgtaaaaatactcataaaaaaatttataaaaattatggcacaaccatatcttgtataggtagtttagttcgtcgagtgaacctataaacagataatagacaacacgtaataataataatgcctactaatacaagcataataccgggagatgggatatatgacgttgtagtgtttgggttttctgaacgttgatagtctactaatactacatgctgacatctaatgcctgtataaccatgagagcatctacaatacataccgtcaatatctctagcgtggatacagtcaccgtgtaaacaatatccatctccctctggaccgcataatctgatagctggaatatctgttgtagcgtttgtaatttctggcgatgtcgtttcgatagcgttaccactatcggcgaatgatctgattatcatagcagcgaacaacaacatcagatatttcatcgacatttttgatggattttgtgtttatgctgtttctcagtgtgtgtttatgacaagattgggaattttatattattaattcagtaatataaactaataatatattgttaattgtgtaaataatataaaaataacaatacaatattgaatgtgttgctgttaaaaatgatcataaacacggagtttattttatatgtctcgcataaacattactaaaaaaatatattgttctgtttttctttcacatctttaattatgaaaaagtaaatcattatgagatggacgagattgtacgcatcgttcgcgacagtatgtggtacatacctaacgtatttatggacgacggtaagaatgaaggtcacgtttctgtcaacaatgtctgtcatatgtatttcacgttctttgatgtggatacatcgtctcatctgtttaagctagttattaaacactgcgatctgaataaacgaggtaactctccattacattgctatacgatgaatacacgatttaatccatctgtattaaagatattgttacaccacggcatgcgtaactttgatagcaaggatgaaaaaggacaccactatcaatcgataacaagatctttgatatactaacggacaccattgatgactttagtaaatcatccgatctattgctgtgttatcttagatataaattcaatgggagcttaaactattacgttctgtacaaaggatccgacgaggatgaactcacttctcttcattactactgtaaacacatatccacgttctacaaaagcaattattacaagttaagtcacactaagatgcgagccgagaagcgattcatctacgcgataatagattatggagcaaacattaacgcggttacacacttaccttcaacagtataccaaacatagtcctcgtgtggtgtatgctcttttatctcgaggagccgatacgaggatacgtaataatcttgattgtacacccatcatggaacgattgtgcaacaggtcatattctcataatgttactcaattggcacgaacaaaaggaagaaggacaacatctactttatctattcataaaacataatcaaggatacactctcaatatactacggtatctactagataggttcgacattcagaaagacgaatactataataccgcctttcaaaattgtaacaacaatgttgcctcatacatcggatacgacatcaaccttccgactaaagacggtattcgacttggtgtttgaaaacagaaacatcatatacaaggcggatgttgtgaatgacatcatccaccacagactgaaagtatctctacctatgattaaatcgttgttctacaagatgtctctccctacgacgattactacgtaaagaagataatagcctactgcctattaagggacgagtcattcgcggaactacatagtaaattctgtttaaacgaggactataaaagtgtatttatgaaaaatatatcattcgataagatagattccatcatcgtgacataagtcgccttaaagagattcgaatctccgacaccgacctgtatacggtatcacagctatcttaaagccatacattcagacagtcacatttcatttcccatgtacgacgatctcatagaacagtgccatctatcgatggagcgtaaaagtaaactcgtcgacaaagcactcaataaattagagtctaccatcggtcaatctagactatcgtatttgcctccggaaattatgcgcaatatcatctaaacagtatgttgtacgaaaagaaccattacaaatattatccatgatagaaagaaaatatctatatgattggagaagtaggaaacaggaacaagacgacgattactacattattaaatcatgaagtccgtattatactcgtatatattgtttctctcatgtataataataaacggaagagatatagcaccgcatgcaccatccgatggaaagtgtaaagacaacgaatacaaacgccataatttgtgtccgggaacatacgcttccagattatgcgatagcaagactaacacacaatgtacgccgtgtggttcgggtaccttcacatctcgcaataatcatttacccgcttgtctaagttgtaacggaagacgcgaccgtgtaacacgactcacaatagaatctgtgaatgctctcccggatattattgtcttctcaaaggatcatccggatgcaaggcatgtgtttcccaaacaaaatgtggaataggatacggagtatccggagacgtcatctgttctccgtgtggtctcggaacatattctcacaccgtctcttccgcagataaatgcgaacccgtacccagtaatacctttaactatatcgatgtggaaattaatctgtatccagttaacgaccactaccggtctcagcgaatccatctcaacgtcggaactaactattactatgaatcataaagactgtaatcccgtatttcgtgaggaatacttctccgtccttaataaggtagcaacttcaggtttctttacaggagaaaggtgtgcactctgaatttcgagattaaatgcaataacaaaaatttttcctccaaacagttaacgaaagcaaagaatgatgacggtatcatgccgcattcggagactgtctatctagcgtcgacatctatatactatatagtaataccaatactcaagactacgaaactgatacaatctcttatcatgtgggtaatgttctcgatgtcgatagccatatgcccggtagttgcgatatacataaactgatcactaattccaaacccacccgctttttatagtaagtttttcacccataaataataaatacaataattaatttctcgtaaaagtagaaaatatattctaatttattgcacggtaaggaagtagaatcataaagaacagtactcaatcaatagcaatcatgaaacaatatatcgtcctggcatgcatgtgcctgccagtcttcagcaatcatcctcatcctcctcctcgtgtacggaagaagaaaacaaacatcatatgggaatcgatgttattatcaaagtcacaaagcaagaccaaacaccgaccaatgataagatttgccaatccgtaacggaaattacagagtccgagtcagatccagatcccgaggtggaatcagaagatgattccacatcagtcgaggatgtagatcctcctaccacttattactccatcatcggtggaggtctgagaatgaactttggattcaccaaatgtcctcagattaaatccatctcagaatccgctgatggaaacacagtgaatgctagattgtccagcgtgtccccaggacaaggtaaggactctcccgcgatcactcatgaagaagctctggctatgatcaaagactgtgaggtgtctatcgacatcagatgtagcgaagaagagaaagacagcgacatcaagacccatccagtactcgggtctaacatctctcataagaaagtgagttacgaagatatcatcggttcaacgatcgtcgatacaaaatgtgtcaagaatctagagtttagcgttcgtatcggagacatgtgcaaggaatcatctgaacttgaggtcaaggatggatttaagtatgtcgacggatcggcatctgaaggtgcaaccgatgatacttcactcatcgattcaacaaaactcaaagcgtgtgtctgaatcgataactctattcatctgaaattggatgagtagggttaatcgaacgattcaggcacaccacgaattaaaaaagtgtaccggacactatattccggtttgcaaaacaaaaatgttcttaactacattcacaaaaagttacctctcgcgacttcttctttttctgtctcaatagtgtgatacgattatgacactattcctattcctattcctatttcctttcagggtatcacaaaaatattaaacctctttctgatggtctcataaaaaaagttttacaaaaatatttttattctctttctctctttgatggtctcataaaaaaagttttacaaaaatatttttattctctttctctctttgatggtctcataaaaaaagttttacaaaaatatttttattctctttctctctttgatggtctcataaaaaaagttttacaaaaatatttttattctctttctctctttgatggtctcataaaaaaagttttacaaaaatatttttattctctttctctctttgatggtctcataaaaaaagttttacaaaaatatttttattctctttctctctttgatggtctcataaaaaaagttttacaaaaatatttttattctctttctctctttgatggtctcataaaaaaagttttacaaaaatatttttattctctttctctctttgatggtctcataaaaaatattaaacctctttctgatggtgtcactaaaatatttttattctcattctcattttctctttctctcttcaatggagtcataaaatatttttattctctttctctcttcgatggtctcacaaaaatattaaacctctttctgatggtgtcactaaaatatttttattctcattctcattttctctttctctcttcaatggagtcataaaatatttttattctctttctctcttcgatggtctcacaaaaatattaaacctctttctgatggagtcgtaaaaaagttttatctctttctctcttcgatggtctcacaaaaatattaaacctctttctgatggagtcgtaaaaaagttttatctctttctctcttcgatggtctcacaaaaatattaaacctctttctgatggagtcgtaaaaaagttttatctctttctctcttcgatggtctcacaaaaatattaaacctctttctgatggagtcgtaaaaaagttttatctctttctctcttcgatggtctcacaaaaatattaaacctctttctgatggagtcgtaaaaaagttttatctctttctctcttcgatggtctcacaaaaatattaaacctctttctgatggagtcgtaaaaaagttttatctctttctctcttcgatggtctcacaaaaatattaaacctctttctgatggagtcgtaaaaaagttttatctctttctctcttcgatggtctcacaaaaatattaaacctctttctgatggagtcgtaaaaaagttttatctctttctctcttcgatggtctcacaaaaatattaaacctctttctgatggagtcgtaaaaaagttttatctctttctctcttcgatggtctcacaaaaatattaaacctctttctgatggagtcgtaaaaaagttttatctctttctctcttcgatggtctcacaaaaatattaaacctctttctgatggagtcgtaaaaaagttttatctctttctctcttcgatggtctcacaaaaatattaaacctctttctgatggagtcgtaaaaaagttttatctctttctctcttcgatggtctcacaaaaatattaaacctctttctgatggagtcgtaaaaaagttttatctctttctctcttcgatggtctcacaaaaatattaaacctctttctgatggagtcgtaaaaaagttttatctctttctctcttcgatggtctcacaaaaatattaaacctctttctgatggagtcgtaaaaaagttttatctctttctctcttcgatggtctcacaaaaatattaaacctctttctgatggagtcgtaaaaaagttttatctctttctctcttcgatggtctcacaaaaatattaaacctctttctgatggagtcgtaaaaaagttttatctctttctctcttcgatggtctcacaaaaatattaaacctctttctgatggagtcgtaaaaaagttttatctctttctctcttcgatggtctcactaaaatattttttattctctttctgatgcatcaactatttcttaaacaataacgtccaacaacatatactcgtcgagcttatcaacatcccctatgcccatctaggttaccagacaattgtatatcataaaataatgtttataatttacacgttaaaatcatataataaaacgtagatcgtataatattttttggtatataaatgatctagtaaaatccatgtaggggatactgctcacattttttctttggtacaaaatttcacacaagtttttatacagacaaattcttgtccatatattttaaaacattgacttttgtactaagaaaaatatctagatcaactatctctttctctttctctcttcgatggtctcacaaaaatattaaacctctttctgatggagtcgtaaaaaagttttatctctttctctcttcgatggtctcacaaaaatattaaacctctttctgatggagtcgtaaaaaagttttatctctttctctcttcgatggtctcacaaaaatattaaacctctttctgatggagtcgtaaaaaagttttatctctttctctcttcgatggtctcacaaaaatattaaacctctttctgatggagtcgtaaaaaagttttatctctttctctcttcgatggtctcacaaaaatattaaacctctttctgatggagtcgtaaaaaagttttatctctttctctcttcgatggtctcacaaaaatattaaacctctttctgatggagtcgtaaaaaagttttatctctttctccttcgatggtctcacaaaaatattaaacctctttctgatggagtcgtaaaaaagttttatctctttctctcttcgatggtctcacaaaaatattaaacctctttctgatggagtcgtaaaaaagttttatctctttctctcttcgatggtctcacaaaaatattaaacctctttctgatggagtcgtaaaaaagttttatctctttctccttcgatggtctcacaaaaatattaaacctctttctgatggagtcgtaaaaaagttttatctctttctccttcgatggtctcacaaaaatattaaacctctttctgatggagtcgtaaaaaagttttatctctttctctcttcgatggtctcacaaaaatattaaacctctttctgatggagtcgtaaaaaagttttatctctttctctcttcgatggtctcacaaaaatattaaacctctttctgatggtctctataaagcgatcgatctttcttacactctagagtttcctacagtcatgggtcacacatttttttctagacactaaataaaattagtaaaattaaattaattataaaattatatatataatttactaactttagttagataaattaataatatataagttttagtacattaatattatattttaaat

SEQ ID NO: 35 - DNA, 191737 bp, Artificial Sequence
  Vaccinia virus Copenhagen
gtaaaattaaattaattataaaattatgtatatgatttactaactttagttagataagttagtaatacataaattttagtatattaatattatattttaaatatttatttagtgtctagaaaaaaatgtgtgaccaacgaccgtaggaaactctagagggtaagaaaaatcaatcgctttatagagaccatcagaaagaggtttaatatttttgtgagaccatcgaaggagaaagagataaaacttttttacgactccatcagaaagaggtttaatatttttgtgagaccatcgaaggagaaagagataaaacttttttacgactccatcagaaagaggtttaatatttttgtgagaccatcgaaggagaaagagataaaacttttttacgactccatcagaaagaggtttaatatttttgtgagaaaggagaaagagataaaacttttttacgactccatcagaaagaggtttaatatttttgtgagaccatcgaaggagaaagagataaaacttttttacgactccatcagaaagaggtttaatatttttgtgagaccatcgaaggagaaagagataaaacttttttacgactccatcagaaagaggtttaatatttttgtgagaccatcgaaggagaaagagataaaacttttttacgactccatcagaaagaggtttaatatttttgtgagaccatcgaaggagactccatcagaaagaggtttaatatttttgtgagaaaggagaaagagataaaacttttttacgactccatcagaaagaggtttaatatttttgtgagaaaggagaaagagataaaacttttttacgactccatcagaaagaggtttaatatttttgtgagaccatcgaaggagaaagagataaaacttttttacgactccatcagaaagaggtttaatatttttgtgagaccatcgaaggagaaagagataaaacttttttacgactccatcagaaagaggtttaatatttttgtgagaccatcgaagagagaaagagataaaacttttttacgactccatcagaaagaggtttaatatttttgtgagaccatcgaagagagaaagagataaaacttttttacgactccatcagaaagaggtttaatatttttgtgagaccatcgaagagagaaagagataaaacttttttacgactccatcagaaagaggtttaatatttttgtgagaccatcgaagagagaaagagataaaacttttttacgactactccatcagaaagaggtttaatatttttgtgagaccatcgaagagagaaagagataaaacttttttacgactccatcagaaagaggtttaatatttttgtgagaccatcgaagagagaaagagataaaacttttttacgactccatcagaaagaggtttaatatttttgtgagaccatcgaagagagaaagagataaaacttttttacgactccatcagaaagaggtttaatatttttgtgagaccatcgaagagagaaagagataaaacttttttacgactccatcagaaagaggtttaatatttttgtgagaccatcgaagagagaaagagataaaacttttttacgactccatcagaaagaggtttaatatttttgtgagaccatcgaagagagaaagagataaaacttttttacgactccatcagaaagaggtttaatatttttgtgagaccatcgaagagagaaagagataaaacttttttacgactccatcagaaagaggtttaatatttttgtgagaccatcgaagagagaaagagataaaacttttttacgactccatcagaaagaggtttaatatttttgtgagaccatcgaagagagaaagagataaaacttttttacgactccatcagaaagaggtttaatatttttgtgagaccatcgaagagagaaagagataaaacttttttacgactccatcagaaagaggtttaatatttttgtgagaccatcgaagagagaaagagataaaacttttttacgactccatcagaaagaggtttaatatttttgtgagaccatcgaagagagaaagagataaaacttttttacgactccatcagaaagaggtttaatatttttgtgagaccatcgaagagagaaagagataaaacttttttacgactccatcagaaagaggtttaatatttttgtgagaccatcgaagagagaaagagataaaacttttttacgactccatcagaaagaggtttaatatttttgtgagaccatcgaagagagaaagagataaaacttttttacgactccatcagaaagaggtttaatatttttgtgagaccatcgaagagagaaagagataaaacttttttacgactccatcagaaagaggtttaatatttttgtgagaccatcgaagagagaaagagataaaacttttttacgactccatcagaaagaggtttaatatttttgtgagaccatcgaagagagaaagagataaaacttttttacgactccatcagaaagaggtttaatatttttgtgagaccatcgaagagagaaagagataaaacttttttacgactccatcagaaagaggtttaatatttttgtgagaccatcgaagagagaaagataaaacttttttacgactccatcagaaagaggtttaatatttttgtgagaccatcgaagagagaaagagataaaacttttttacgactccatcagaaagaggtttaatatttttgtgagaccatcgaagagagaaagagataaaacttttttacgactccatcagaaagaggtttaatatttttgtgagaccatcgaagagagaaagagaaagagatagttagtctagatatttttcttagtacaaaagtcaatgttttaaaatatatggacaagaatttgtctgtataaaaacttgtgtgaaattttgtaccaaagaaaaaatgtgagcagtatcccctacatggattttactagatcatttatataccaaaaaatattatacgatctacgttttattatatgattttaacgtgtaaattataaacattattttatgatatacaattgtctggtaacctagatgggcataggggatgttgataagctcgacgagtatatgttgttggacgttattgtttaagaaatagttgatgcatcagaaagagaataaaaaatattttagtgagaccatcgaagagagaaagagataaaacttttttacgactccatcagaaagaggtttaatatttttgtgagaccatcgaagagagaaagagaataaaaatattttatgactccattgaagagagaaagagaaaatgagaatgagaataaaaatattttagtgacaccatcagaaagaggtttaatatttttgtgagaccatcgaagagagaaagagaataaaaatattttatgactccattgaagagagaaagagaaaatgagaatgagaataaaaatattttagtgacaccatcagaaagaggtttaatattttttatgagaccatcaaagagagaaagagaataaaaatatttttgtaaaactttttttatgagaccatcaaagagagaaagagaataaaaatatttttgtaaaactttttttgtgagaccatcgaagagagaaagagaataaaaatatttttgtaaaactttttttatgagaccatcaaagagagaaagagaataaaaatatttttgtaaaactttttttatgagaccatcaaagagagaaagagaataaaaatatttttgtaaaactttttttatgagaccatcaaagagagaaagagaataaaaatatttttgtaaaactttttttatgagaccatcaaagagagaaagagaataaaaatatttttgtaaaactttttttatgagaccatcaaagagagaaagagaataaaaatatttttgtaaaactttttttatgagaccatcaaagagagaaagagaataaaaatatttttgtaaaactttttttatgagaccatcagaaagaggtttaatatttttgtgataccctgaaaggaaataggaataggaataggaatagtgtcataatcgtatcacactattgagacagaaaaagaagaagtaacgagaggtaactttttgtgaatgtagttaagaacatttttgttttgcaaaccggaatatagtgtccggtacacttttttaattcgtggtgtgcctgaatcgttcgattaaccctactcatccaatttcagatgaatagagttatcgattcagacacacgctttgagttttgttgaatcgatgagtgaagtatcatcggttgcaccttcagatgccgatccgtcgacatacttgaatccatccttgacctcaagttcagatgattccttgcacatgtctccgatacgaacgctaaactctagattcttgacacattttgtatcgacgatcgttgaaccgatgatatcttcgtaactcactttcttatgagagatgttagacccgagtactggatgggtcttgatgtcgctgtctttctcttcttcgctacatctgatgtcgatagacacctcacagtctttgatcatagccagagcttcttcacgagtgatcgcgggagagtccttaccttgtcctggggacacgctggacaatctagcattcactgtgtttccatcagcggattctgagatggatttaatctgaggacatttggtgaatccaaagttcattctcagacctccaccgatgatggagtaataagtggtaggaggatctacatcctcgactgatgtggaatcatcttctgattccacctcgggatctggatctgactcggactctgtaatttccgttacggattggcaaatcttatcattggtcggtgtttggtcttgctttgtgactttgataataacatcgattcccatatgatgtttgttttcttcttccgtacacgaggaggaggatgaggatgattgctgaagactggcaggcacatgcatgccaggacgatatattgtttcataattgctattgattgagtactgttctttatgattctacttccttaccatgcaataaattagaatatattttctacttttacgagaaattaattattgtatttattatttatgggtgaaaaacttactataaaaagcgggtgggtttggaattagtgatcagtttatgtatatcgcaactaccgggcatatggctatcgacatcgagaacattacccacatgataagagattgtatcagtttcgtagtcttgagtattggtattactatatagtatatagatgtcgacgctagatatacagtctccgaatgcggcatgataccgtcatcattctttgctttcgttaactgtttggaggaagaatctttgttattgcatttaatctcgaaattcagagtgcacacctttctcctgtaaagaatcctgaagtcgctaccttattaagaacggagaagtatccatcacgaaatacgggattacagtctttatgattcatagtaatagttagttccgacgttgagatggattcactgagaccggtagtggtcgtccgagtacacgacgtgtcgttgacgggatacagattaatttccacatcgatatagttaaaggtatttctgggtacgggttcgcatttatctgcggaagagacggtgtgagaatatgttccgagaccacacggagaacagatgacgtctccggatactccgtatcctattccacattttgtttgggaaacacatgccttgcatccggatgatcctttgagaagacaataatatccgggagagcattcacagattctattgtgagtagtgttacacgatcgcgtcttccgttacaacttagacaagcgggtaaatgattattgcgagatgtgaaggtacccgaaccacacggcgtacattgtgtgttagtcttgctatcgcataatctggaagcgtatgttcccggacacaaattatggcgtttgtattcgttgtctttacactttccatcggatggtgcatgcggtgctatatctcttccgtttattattatacatgagagaaacaatatatacgagtataatacggacttcataatttaataatgtagtaatcgttgtcgtgttcctgtttcctacttctccaatcatatagatattttctttctatcatggataatatttgtaatggttctttccgtacaacatactgtttagatgatattgcgcataatttccggaggcaaatacgatagtctagattgaccgatggtagactctaatttattgagtgctttgtcgacgagtttacttttacgctccatcgatagatggcactgttctatgagatcgtcgtacatgggaaatgaaatgtgtctgtccgaatgtatggcttcaagatagctgtgataccgtatacaggtcggtgtcggagattcgaatctctttgaggcgacttatgtcacgatgatggaatctatcttatcgaatgatatatttttcataaatacacttttatagtcctcgtttaaacagaatttactatgtagttccgcgaatgactcgtcccttaataggcagtaggctagtatcttttttacgtagtaatcgtcgtagggagagaattctgacatcttgtagaacaacgatttaatcataggtagagatactttcagtctgtggtggatgatgtcattcacaacatccgccttgtatatgatgtttctgttttcaaacaccaagtcgaataccgtctttagtcggaaggttgatgtcgtatccgatgtatgaggcaacattgttgttacaattttgaaaggcggtatatgtattcgtctttctgaatgtcgaacctatctagtagataccgtagtatattgagagtgtatccttgattatgttttatgaatagataaagtagatgttgtccttcttccttttgttcgtgccaattgagtaacattatgagaatatgacctgttgcacaatcgttccatgatgggtgtacaatcaagattattacgtatcctcgagataaaagagcatacaccacacgaggactatgtttggtatactgttgaaggtaagtgtgtaaccgcgttaatgtttgctccataatctattatcgcgtagatgaatcgcttctcggctcgcatcttagtgtgacttaacttgtaataattgcttttgtagaacgtggatatgtgtttacagtagtaatgaagagaagtgagttcatcctcgtcggcgcaattagggtcggatcctttgtacagaacgtagtagtttaagctcccattgaatttatatctaagataacacagcaatagatcggatgatttactaaagtcatcaatggtgtccgttagtatatcaaagatcttgttatcgattgatagtgaatgaatcagatagtggtgtcctttttcatccttgctatcaaagttacgcatgccgtggtgtaacaatatctttaatacagatggattaaatcgtgtattcatcgtatagcaatgtaatggagagttacctcgtttattcagatcgcagtgtttaataactagcttaaacagatgagacgatgtatccacatcaaagaacgtaaaatacatatgacaaacattgttgacagaaacgtgaccttcattcttaccgtcgtccataaatacgttaggtatgtaccacatactgtcgcgaacgatgctcacaatctcgtccatctcgcccatctcatacatttcatcatttactttttcataattagagatgtacgaaagaaaaagaaaaagaaaaagaaaaacagaacaatatatttttttagtaatgtttatgcgagacatataaaataaactccgtgtttatgatgccggtaaatgtttttatcatcttggacggaatcgattttgtaatatgtcatggaaacaaatgaaacaggacattatcactccatgataaattatttaatggagtaataaagtatctccatgggtaatttcgaaatcaagttatcgtctgtattaatgttgtccactatggagtcgatcctctcactgttctttacagtttctgtaatgatggacgttagttcttttttgtaccatttgatgtcggattctttgcgtatctcagtctgtggcgtttgcttcgtttaaataatatatcaaacatggagacgcctgatatgtaggcattcttcattctattaatgtctactctatagcgctttagttccttatgatgaccggcgatatcatacttactttagaaggaaaatcatcatctaggattaaggcgtatctgatacaggcgaataatggttcaggatatagatagcgtatatctctattaaatgcgtcaatcatagtctctagagtgggatggtagctaagtaataaatcaactatcctcgttttgttttctctttggtaactgcttttctggatggccgtattgattatcgagcgtgatgttgtaacactcgctccatattccaataaccgctttgcaaattgtatattattgacatcgaccgcgtaatatagtagagttttattctcattatcgatcatatctatatcatccatgtacttgcttagtatatcaaatacatctattagtatggtttcataacagtgatacccgcaattattaaatctcgataatatcagaccgtacatacatagacggccattgttagatatgtgatttacagccgcgtgtccatattttccacgataaaccttacgacgtttacatcgacgagattattattaacaaagtagtcgtgcagaggatagttgttgtccgttatctaacatgcatcgaacgaccatatcgccgtaatgtaagtagtttatcaacatggcttgtacgatggattcatcctgttgtctaaatctctttagaatgttatcgatgatgtagtggttatattctctggaatcgtacgaagtaatactacgcattacgtcgacaagagtatgacgtctctcaataagaagattaacgatttccatgtctacattatatggggttactctaaatcgcttgtttagataatacgcctctaatatagggctgacgtcgtatactctacacgtgtccacatcctttattaataataatttaacaatctctatatctatggttgagaaagaccagtagtattggatgggtaaagatcctccttcgtctctgccatggatggaaacattgttattgatcaaacatttaattacatccttggatagagattgagattctctatgagacgatatatagtaatgaagagagttcttacacatatcactgttgtacatacaggtacgaaatacgtaaccggtgctgtaacattctgatttaagaagccatagcaatacttctggtctcggattaggcgtcgttacgtatatatccaccaatccgagaccattgattgcataattcgtattcttggacggacgtatccgtttatccacaattaggtattttagcagacgtaagtcgatattatccgaagacagatcgaaatcatttatattcgacttgagttcgttagaggaattcgaatagctggatatcagtagatgcacaatctgagattttacgtatctatgcttactgtatgctcctagcggagttaatccttcgttgtttctacaaagtctctcgactccgcgagagagtaacagtcgaacaatcttaatgtctgtatcgcatttattggagacgtaacaatgtagcgcattgtttcctcgtctatctatatgttttgataagttgtgacacgtttcaatctctagttttatttttttgtacgtcacatcttcatccagtagacgacatagaatagtgcactctctaccacaataatccatagctattctggtgctaattattcctatttcacgaaaaatgatgaaggcaatcattcctcataagatgataaaaagtgtagtgagagagcatgaaggagatttagtatttagcagtgcggatatgatccaagagggtgagatagtcgttctcgttcagaatctttcgcagcataagtagtatgtcgatatacttatcgttgaagactcttccagagacgatagctgattgagtacaaagtccaatgattgcacgaagttcttcggcggttttcatggagtcatttctgatgaaacatttaatgatctccacgcaattgtcgatattgtcccacggaagtgaatccttcaactcaccaccaaagagctccgttgcatcagttctgaaagagatgagaagcctgtagagagaccctgcgctttctctatgggtccatctatgagaaacccacaggatgtattcagtcagacaatgtctgacgtcggccacggtattcagggagtccttagtagcgtggcaatgacagggtctgaactgggcacaaggaaaggccattgtaaaggtagacctgtagccgtttatgctaatagagggctttaatttccatttttttaatgggttgtggatgaggaatgagagtgatatcatattgagatacgtagttatgtagaggtgtatttcctatattatttactttcggtttcatattttaccaactctttaataaatttcttttcacgatgcatcttattgaatgacgttttctcataagtggacatatagatgcagaagtaatgaagaaaagtattacctctatcatctacataattagggtctgctcctttttttaacaacttatacagtacgtagtagtagtttatcggttttaaatcaagtctagaatatatagtggattaatatatttttatattagctaaagctatctatactatcagaaagcatatcattctcaacttcatcatgagttaaatatttgtgtaatggatgtcatgaacattaaacgtattcatgacatactcctttaataggttttttaaaacagatgattcaaatccttcattcattagataacagtgtaacggagtcgtaccttctactagtttgtttatatcacagcattctacaaacagtctaaacaatagagaagacggacagactttaacgtataaatgacacatgttatcgatattcgttgatgaattattattaaacgtagttatgataaatgattctaacgacatctctcgctagagataaaatctagtatcgtatcattaaacatctttgcatcatactcgcatagcatagtttttcataattaatacaatatttaaaagacttattcggaaagtattttaatacatgtatcatcgatggagatccatatgaggagtcacttgtagttcttcagtagtaataacagtgctatcatcgatagtataattatatgtagaaggttcatatgttgttgtaattggagtaactgttggtagttcttccgtggaatcaataattatactaacagcaatagtataattatataaatatgttccgttgatatcacatattttaatgaactcatttctaacaccctcagctatatctgtccaattaaatgtagccaacaatctactacgttctctttgattgactacttgtacggtagcgacgctacactatctttattgtcttctacatgctccaattgaatgtcatgatacaacgcagtttttcttatgcatgtttcataacaccacgaacatgtcgcagtaagatatatagccagagataatttctgtaaattcatgattgccggtcataaacaagcccgtcaataattgtggctatatattcagtttatagagcaaaataattaagcacaatagcgcttaatctcaaaatatgttatgtttatttttttcatattaaacatactggttaaaatcctctaaaggctgatcttcatctataaatcaagatcataattacatttagacagtggtttcatgtttataaaaatgttctttttgtgtgaataaggaatatactaatcaataatcaaccatcgaccccattacgatagtatgcaggcaacccccattagagaggtacgtgtaatcagtctctccagttttagtatttttataagtcattgttacataaacggcttttaaacagtctcctcgataataagccatatctggaaatttattaaatactcgagtcattttacgcacggtcaaaaaagtaagtaatgtcgacgacttcttacattctatagaaacacctagaatactcattttcttttggaaaatatcctcagactctgatttgaacaatgcacgacctatagtaaaccgtgaccaataagttatattagtcaatggtatatccaaaccatcaggtgtggatagtccagtctttggtatcgatagtgtagttattgaactgagaagttaccgtatagtctttttggtcatctctaaacaaggaaactaatacctctacactattgaacgatttatcttccgtaatgggtggactagcgatggatgaagtcacgaatataagacacgctattaatccgtatatcatcattttgatattacttataataacgatttgtttaatttttagtttatactattaattgtaaatgatattattatttttttaagtattatcagctttagtttatactattactatttgtaatatttagacatagataaacgtgataaaagtctatttgtttatatttattgcggatagcagtatttccctataaaaagtatacgtcctgtggtgtctttaatcatgtacatgaatggatggtttatgtagaccttcgtacgatataccatcgaaaagttaatcgtaaatactcctgtaacggccgatgcttctgtatactcctcattaacatctataaacgtcgtatgtagaaatttttctacagtgatagtttcattacacatcttgctaaaatctgcataatatccgaatatattagtaagtcctaaattttctaaaatcggtaccagattatacggttctgtcatttccactttaaactttggcatatacaagtctatacttttagtagataacataccacaccattttttaaatttttcatctgttatatttttttctatgttatatataccttctatgtcgtccggtagtataatcaccatactagagtttccctcgtatggaatatcgataatagagaatcctccgaataattcattaatatgtacatattgcaagttattctcggtacccaccatcatatcaacactggtaactatattcttagaaatataaaacttgtctgtatatgtaagatgtttagaaaatggatatttccacattgctttaaaatggacggcgctaacaactgtcatacgagtattaatggatagcggactagtcaataaggaattaattttaccatttgtcattgtcttaacccattcgttgattagttcctttgtttggttagcattattaaagtttacagtttgaaaatcgtcttttattttttgtaggaaggaggcgtggaactcgatactatcgctaccgtatattttatttgcggtagctagtgtcgcacaatacggaatatctacgtccatgtcattattgtcatcgggtgtattctcattcatattctctatatattttgatagttgttcagctgtagaaccagctgctccatgatttagaatagataaagtagataaaatagaaactggagaaatcaaaacattttcatcagggtgttttacgattagttctttaaagatatccatggtatagaccaaacaataacgataacgatatatatcataaataaataatgttaaatttcagtttatgtttgtaccccgtattcatacttaacaaattggtattgcgtacacaatcaatcatattacataccattaataatgcaagcataaaaaatcgttagtagatgtttctaaatataggttccgtaagcaaagaatataagaatgaagcggtaatgataaaatcaatcgttatctaaaatgatcatactcatttattttattctattatattaacacatacatttttaacagcaacacattcaatattgtattgttatttttatattatttacacaattaacaatatattattagtttatattactgaattaataatataaaattcccaatcttgttataaacacacactgagaaacagcataaacacagaatccatcaaaaatgtcgatgaaatatctgatgttgttgttcgctgctatgataatcagatcattcgccgatagtggtaacgctatcgaaacgacattgccagaaattacaaacgctacaacagatattccagctatcagattatgcggtccagagggagatggatattgtttacacggtgactgtatccacgctagagatatcgacggtatgtattgtagatgctctcatggttatacaggcattagatgtcagcatgtagtattagtagactatcaacgttcagaaaacccaaacactacaacgtcatatatcccatctcccggtattatgcttgtattagtaggcattattattattattacgtgttgtctattatctgtttataggttcactcgaagaactaataaactacctctacaagatatggttgtgccataatttttataaattttttttatgagtatttttacaaaaatgtataaagtgtatgtcttatgtatatttataaaaatgctaaatatgcgatgtatctatgttatttgtatttatctaaacaatacctctacctctagatattatacaaaaattttttatttcagcatattaaagtaaaatctagttaccttgaaaatgaatacagtgggtggttccgtatcaccagtaagaacataatagtcgaatacagtatccgattgagattttgcatacaatactagtctagaaagaaatttgtaatcatcttctgtgacgggagtccatatatctgtatcatcgtctagtttatcagtgtcccatgctatattcctgttatcatcattagttaatgaaaataactctcgtgcttcagaaaagtcaaatattgtatccatacatacatctccaaaactatcgcttatacgtttatctttaacgatacctatacctagatggttatttactaacagacattttccagatctattgactataactcctatagtttccacatcaaccaagtaatgatcatctattgttatataacaataacataactcttttccgtttttatcagtatgtatatctatattaacgtcgtcgttgtagtgaatagtagttattgatctattatatgaaacggatatgtctagaacggcaattgttttacgtccagttaacactttctttgatttaaagtctagagtctttgcaaacataatatccttatccgactttatatttcctgtagggtggtataattttattttgcctccacatatcggtgtttccaaatatattactagacaatattccatatagttattagttaagggtacccaattagaacacgtacgcttattatcatcatttggatcgtatttcataaaagttattgtactatcgatgtcaacacattctacattttttaatcgtctatatagtatttttctgatattttctataatatcagaattgtcttccatcggaagttgtatactatcagaatcagttacatgtttaaataattctctgatgtcattccttatacaatcaaattcattattaaacagtttaatagtctgtagacctttatcgtcgtaaatatccattgtcttattagttacgcttatttttatgtgtttttacgttgctttattatattttataagaatgattgtttgacgaatcacgagaactattaagacatatattattagaggtatatattataaaaaagtttttgattacgatgttataagaggaaagaggacacattaacatcatacatcaattaactacattcttataacatcgtaatcaaaagaattgcaattttgatgtataacaactgtcaatgggttatggaattgtatattacatattatacagtatgttggtaacgacaaataccgatcggtaattgtctgccggtgtaatagaattatatatatctatctattacaccggctgagtacctacactattatatgattatagtttctatttttacagtaccttaactaaagtctctagtcacaagagcaatactaccaacctacactattatatgattatagtttctatttttataggaacgcgtacgagaaaatcaaatgtctaatttctaacggtagtgttgataaacgattatcgtcaatggatacctcctctatcatgtcgtctattttcttactttgttctattaacttattagcattatatattatttgattataaaacttatattgcttattagcccaatctgtaaatatcggattattaacatatcgtttctttgtaggtttatttaacatgtacatcactgtaagcatgtccgtaccatttattttaatttgacgcatatccgcaatttctttttcgcagtcggttataaattctatatatgatggatacatgctacatgtgtacttataatcgactaatatgaagtacttgatacatattttcagtaacgatttattattaccacctatgaataagtacctgtgatcgtctaggtaatcaactgttttcttaatacattcgatggttggtaatttactcagaataatttccaatatcttaatatataattctgctatttctggaatatatttatctgccagtataacacaaatagtaatacatgtaaacccatattttgttattatattaatgtctgcgccattatctattaaccattctactaggctgacactatgcgacttaatacaatgataaagtatactacatccatgtttatctattttgtttatatcatcaatatacggcttacaaagttttagtatcgataacacatccaactcacgcatagagaaggtagggaataatggcataatatttattaggttatcatcattgtcattatctacaactaagtttccattttttaaaatatactcgacaactttaggatctctattgccaaatttttgaaaatatttatttatatgcttaaatctatataatgtagctccttcatcaatcatacatttaataacattgatgtatactgtatgataagatacatattctaacaatagatcttgtatagaaactgtatatcttttaagaattgtggatattaggatattattacgtaaactattacacaattctaaaatataaaacgtatcacggtcgaataatagttgatcaactatataattatcgattttgtgatttttcttcctaaactgtttacgtaaatagttagatagaatattcattagttcatgaccactatagttactatcgaataacgcgtcaaatatttcccgtttaatatcgcatttgtcaagataataatagagtgtggtatgttcacgataagtataataacgcatctcttttttgtgtgaaattaaatagtttattacgtccaaagatgtagcataaccatcttgtgacctagtaataatataataatagagaactgttttacccattctatcatcataatcagtggtgtagtcgtaatcgtaatcgtctaattcatcatcccaattataatattcaccagcacgtctaatctgttctattttgatcttgtatccatactgtatgttgctacatgtaggtattcctttatccaataatagtttaaacacatctacattgggatttgatgttgtagcgtatttctctacaatattaataccatttttgatactatttatttctatacctttcgaaattagtaatttcaataagtctatatcgatgttatcagaacatagatattcgaatatatcaaaatcattgatatttttatagtcgactgacgacaataacaaaatcacaacatcgtttttgatattattatttttcttggtaacgtatgcctttaatggagtttcaccatcatactcatataatggatttgcaccactttctatcaatgattgtgcactgctggcatcgatgttaaatgttttacaactatcatagagtatcttatcgttaaccatgattggttgttgatgctatcgcattttttggtttctttcatttcagttatgtatggatttagcacgtttgggaagcatgagctcatatgatttcagtactgtagtgtcagtactattagtttcgatcagatcaatgtctagatctatagaatcaaaacacgataggtcagaagataatgaatatctgtacgcttctttttgtactgtaacttctcgttttgttagatgtttgcatcgtgctttaacatcaatggtacaaattttatcctcgctttgtgtatcatattcgtccctactataaaattgtatattcagattatcatgagatgtgtatacgctaacggtatcaataaacggagcacaccatttagtcataaccgtaatccaaaaatttttaaagtatatcttaacgaaagaagttgtatcatcgttaggatttggtaaatcattatctacagtgtatggtactagatcctcataagtgtatatatctagagtaatgtttaatttatcaaatggttgataatatggatcctcatgacaatttccgaagatggaaatgagatatagacatgcaataaatctaatcgaagacatggttactccttaaaaaaatacgaataatcaccttggctatttagtaagtgtcatttaacactatactcatattaatccatggactcataatctctatacgggattaacggatgttctatatacggggatgagtagttctcttctttaactttatactttttactaatcatatttagactgatgtatgggtaatagtgtttgaagagctcgttctcatcatcagaataaatcaatatctctgtttttttgttatacagatgtattacagcctcatatattacgtaatagaacgtgtcatctaccttattaactttcaccgcatagttgtttgcaaatacggttaatcctttgacctcgtcgatttccgaccaatctgggcgtataatgaatctaaactttaatttcttgtaatcattcgaaataatttttagtttgcatccgtagttatcccctttatgtaactgtaaatttctcaacgcgatatctccattaataatgatgtcgaattcgtgctgtatacccatactgaatggatgaacgaataccgacggcgttaatagtaatttactttttcatctttacatattgggtactagttttactatcataagtttataaattccacaagctactatggaataagccaaccatcttagtataacacacatgtcttaaagtttattaattaattacatgttgttttatatatcgctacgaatttaaacagagaaatcagtttaggaaaaaaaattatctatctacatcatcacgtctctgtattctacgatagagtgctactttaagatgagacatatccgtgtcatcaaaaatatactccattaaaatgattattccggcagcgaacttgatattggatatatcacaacctttgttaatatctacgacaatagacagcagtcccatggttccataaacagtgagtttatctttctttgaagagatattttgtagagatcttataaaactgtcgaatgacatcgcatttatatctttagctaaatcgtatatgttaccatcgtaatatctaaccgcgtctatcttaaacgtttccatcgctttaaagacgtttccgatagatggtctcatttcatcagtcatactgagccaacaaatataatcgtgtataacatctttgatagaatcagactctaaagaaaacgaatcggctttattatacgcattcatgataaacttaatgaaaaatgtttttcgttgtttaagttggatgaatagtatgtcttaataattgttattatttcattaattaatatttagtaacgagtacactctataaaaacgagaatgacataactagttatcaaagtgtctaggacgcgtaattttcatatggtatagatcctgtaagcattgtctgtattctggagctattttctctatcgcattagtgagttcagaatatgttataaatttaaatcgaataacgaacataactttagtaaagtcgtctatattaactcttttattttctagccatcgtaataccatgtttaagatagtatattctctagttactacgatctcatcgttgtctagaatatcacatactgaatctacatccaattttagaaattggtctgtgttacatatctcttctatattattgttgatgtattgtcgtagaaaactattacgtagaccattttctttataaaacgaatatatagtactccaattatctttaccgatatatttgcacacataatccattctctcaatcactacatctttaagattttcgttgttaagatatttggctaaactatataattctattagatcatcaacagaatcagtatatatttttctagatccaaagacgaactctttggcgtcctctataatattcccagaaaagatattttcgtgttttagtttatcgagatctgatctgttcatatacgccatgattgtacggtacgttatgataaccgcataaaataaaaatccattttcatttttaaccaatactattcataattgagattgatgtaatactttgttactttgaacgtaaagacagtacacggatccgtatctccaacaagcacgtagtaatcaaatttggtgttgttaaacttcgcaatattcatcaatttagatagaaacttatactcatcatctgttttaggaatccatgtattattaccactttccaacttatcattatcccaggctatgtttcgtccatcatcgttgcgcagagtgaataattcttttgtattcggtagttcaaatatatgatccatgcatagatcggcaaagctattgtagatgtgatttttcctaaatctaatataaaactcgtttactagcaaacactttcctgatttatcgaccaagacacatatggtttctaaatctatcaagtggtggggatccatagttatgacgcagtaacatatattattacattcttgactgtcgctaatatctaaatatttattgttatcgtattggattctgcatatagatggcttgtatgtcaaagatatagaacacataaccaatttatagtcgcgctttacattctcgaatctaaagttaagagatttagaaaacattatatcctcggatgatgttatcactgtttctggagtaggatatattaaagtctttacagatttcgtccgattcaaataaatcactaaataatatcccacattatcatctgttagagtagtatcattaaatctattatattttatgaaagatatatcactgctcacctctatatttcgtacatttttaaactgtttgtataatatctctctgatacaatcagatatatctattgtgtcggtagacgataccgttacatttgaattaatggtgttccattttacaacttttaacaagttgaccaattcatttctaatagtatcaaactctccatgattaaatattttaatagtatccattttatatcactacggacacaaagtagctgacataaaccattgtataatttttatgttttatgtttattagcgtacacattttggaagttccggcttccatgtatttcctggagagcaagtagatgatgaggaaccagatagtttatatccgtacttgcacttaaagtctacattgtcgttgtatgagtatgatcttttaaacccgctagacaagtatccgtttgatattgtaggatgtggacatttaacaatctgacacgtgggtggatcggaccattctcctcctgaacacaggacaccagagttaccaatcaacgaatatccactattgcaactataagttacaacgcttccatcggtataaaaatcctcgtatccgttatgtcttccgttggatatagatggaggggattggcatttaacagattcacaaataggtgcctcgggattccataccatagatccagtagatcctaattcacaatacgatttagattcaccgatcaaatgatatccgctattacaagagtacgttatactagagccaaagtctactccaccaatatcaagttggccattatcgatatctcgaggcgatgggcatctccgtttaatacattgattaaagagtgtccatccagtacctgtacatttagcatatataggtcccattttttgctttctgtatccaggtagacatagatattctatagtgtctcctatgttgtaattagcattagcatcagtctccacactattcttaaatttcatattaatgggtcgtgacggaatagtacagcatgatagaacgcatcctattcccaacaatgtcaggaacgtcacgctctccaccttcatatttatttatccgtaaaaatgttatcctggacatcgtacaaataataaaaagcccatatatgttcgctattgtagaaattgtttttcacagttgctcaaaaacgatggcagtgacttatgagttacgttacactttggagtctcatctttagtaaacatatcataatattcgatattacgagttgacatatcgaacaaattccaagtatttgattttggataatattcgtattttgcatctgctataattaagatataatcaccgcaagaacacacgaacatctttcctacatggttaaagtacatgtacaattctatccatttgtcttccttaactatatatttgtatagataattacgagtctcgtgagtaattccagtaattacatagatgtcgccgtcgtactctacagcataaactatactatgatgtctaggcatgggagacttttttatccaacgatttttagtgaaacattccacatcgtttaatactacatatttttcatacgtggtataaactccacccattacatatatatcatcgtttacgaataccgacgcgcctgaatatctaggagtaattaagtttggaagtcttatccatttcgaagtgccgtgtttcaaatattctgccacacccgttgaaatagaaaattctaatcctcctattacatataactttccatcgttaacacaagtactaacttctgattttaacgacgacatattagtaaccgttttccattttttcgtttcaagatctacccgcgatacggaataaacatgtctattgttaatcatgccgccaataatgtatagacaattatgtaaaacatttgcattatagaattgtctatctgtattaccgactatcgtccaatattctgtcctaggagagtaatgggttattgtggatatataatcagagtttttaatgactactatattatgttttataccatttcgtgtcactggctttgtagatttggatatagttaatcccaacaatgatatagcattgcgcatagtattagtcataaacttgggatgtaaaatgttgatgatatctacatcgtttggatttttatgtatccactttaataatatcatagctgtaacatcctcatgatttacgttaacgtcttcgtgggataagatagttgtcagttcatcctttgataattttccaaattctggatcggatgtcaccgcagtaatattgttgattatttctgacatcgacgcattatatagttttttaattccatatcttttagaaaagttaaacatccttatacaatttgtggaattaatattatgaatcatagtttttacacatagatctactacaggcggaacatcaattattacggcagcaactagtatcatttctacattgtttatggtgatgtttatcttcttccagcgcatatagtctaatagcgattcaaacgcgtgatagtttataccattcaatataatcgcttcatcctttagatggtgatcctgaatgcgtttaaaaaaattatacggagacgccgtaataatttccttattcacttgtataatttccccattgatagaaaatatcacgctttccattcttgaagtactataagtaattatagtataatgtaaaggtttatatattcaatattttttataaaaaaatcatttcgacattaattcctttttaaatttgcgtctatcatctatagaaacatattctatgaatttataaaatgcttttacgtgtcctatcgtaggcgatagaaccgctaaaaagcctatcgaatttctacaaaagaatctgttatatggtatagggagagtataaaacattaaatgtccgtacttattaaagtattcagtagccaatcctaactctttcgaatacttattaatggctcttgttctgtacgaatctatttttttgaacaacggacctagtggtatatcttgttctatgtatctaaaataatgtctgactagatccgttagtttaatatcctcagtcatcttgtctagaatggcaaatctaactgcgggtttaggctttagtttagtttctatatctacatctatgtctttatctaacaccaaaaatataatagctaatattttattacaatcatccggatattcttctacgatctcactaactaatgtttctttggttatactagtatagtcactatcggacaaataaagaaaatcagatgatcgatgaataatacatttaaattcatcatctgtaagatttttgagatgtctcattagaatattattagggttagtactcattatcattcggcagctattacttattttattatttttcaccatatagatcaatcattagatcatcaaaatatgtttcaatcatcctaaagagtatggtgaatgactcttcccatctaatttctgaacgttcaccaatgtctctagccactttggcactaatagcgatcattcgcttagcgtcttctatattattaactggttgattcaatctatctagcaatggaccgtcggacagcgtcattctcatgttcttaatcaatgtacatacatcgccgtcatctaccaattcatccaacaacataagctttttaaaatcatcattataataggtttgatcgttgtcatttctccaaagaatatatctaataagtagagtcctcatgattagttaacaactattttttatgttaaatcaattagtacaccgctatgtttaatacttattcatattttagtttttaggattgagaatcaatacaaaaattaatgcatcattaattttagaaatacttagtttccacgtagttaatgaaacatttgaactcatcgtacaggacgttctcgtacaggacgtaactataaaccggtttatatttgttcaagatagatacaaatccgataactttttttacgaattctacgggatccactttaaaagtgtcatacggggttctttttatttttttaaacagatcaatggtgtgatgttgattaggtcttttacgaatttgatatagaatagcgtttacatattctccataatggtcaatcgccatttgttcgtatgtcataaattctttaattatatgacactgtgtattgtttagttcatccttgttcattgttaggaatctattcaaaatggcaattatactagaactataggtgcgttgtatacacatattgatgtgtctgtttatacaatccatgatatttggatccatgctactaccttcgggtaaaattgtagcatcatataccatttctagtactttaggttcattgttatccattgcagaggacgtcatgatcgaatcataaaaaaatatattatttttatgttattttgttaaaaataatcatcgaatacttcgtaagatactccttcatgaacataatcagttacaaaacgtttatatgaagtaaagtatctacgatttttacaaaagtccggatgcataagtacaaagtacgcgataaacggaataataatagatttatctagtttatctttttctatagctttcatagttagatacatggtctcagaagtaggattatgtaacatcagcttcgataaaatgactgggttatttagtcttacacattcgctcatacatgtatgaccgttaactacagagtctacactaaaatgattgaacaatagatagtctaccattgtttcgtattcagatagtacagcgtagtacatagcatcttcacaaattatatcattgtctaatagatatttgacgcatcttatggatcccacttcaacagccatcttaaaatcggtagaatcatattgctttcctttatcattaataatttctagaacatcatctctatcataaaagatacaaatattaactgtttgatccgtaataacattgctagtcgatagcaatttgttaataagatgcgctgggctcaatgtcttaataagaagtgtaagaggactatctccgaatttgttttgtttattaacatccgttgatggaagtaaaagatctataatgtctacattcttgactgttttagagcatacaatatggagaggtgtatttccatcatgatctggttttgagggactaattcctagtttcatcatccatgagattgtagaagcttttggattgtctgacataagatgtctatgaatatgatttttgccaaatttatccactatcctggcttcgaatccgatggacattatttttttaaacactctttctgaaggatctgtacacgccaacaacggaccacatccttcttcatcaaccgagttgttaatcttggctccatactgtaccaataaatttattctctctatgacttcatcatctgttcccgagagataatatagaggtgttttattatgtttatcacacgcgtttggatctgcgccgtgcgtcagcagcatcgcgactattctattattattaattttagaagctatatgcaatggataatttccatcatcatccgtctcatttggagagtatcctctatgaagaagttcttcgacaaatcgttcatctagtcctttaattccacaatacgcatgtagaatgtgataattatttccagaaggttcgatagcttgtagcatattcctaaatacatctaaatttttactattatatttggcataaagagatagataatactcggccgacataatgttgtccattgtagtataaaaattaatatttctatttctatttctgtatatttgcaacaatttactctctataacaaatatcataacttagttcttttatgtcaagaaggcactggtttagttcatctataaatgtcacgccataactaccacgcatgccatactcagaattatgataaagatatttatccttggggtgtaggtaatggggattaatctttgttggatcagtctctaagttaacacatgtcacacatgatccatttatagttatatcacacgatgatgatttatgaattgattccggaagatcgctatcgtattttgtggttccacaattcatttccatacatgttattgtcacactaatattatgatgaactttatctagccgctgagtggtaaacaacagaacagatagtttattatctttaccaacaccctcagccgctgccacaaatctctgatccgtatccatgatggtcatgtttatttctagtccgtatccagtcaacactatgttagcatttctgtcgatatagctttcactcatatgacactcaccaataatagtagaattaatgtcgtaatttacaccaatagtgagttcggcggcaaagtaccaataccggtaatcttgtcgaggaggacatatagtattcttgtattctaccgaatacccgagagatgcgatacaaaagagcaagactaatttgtaaaccatcttactcaaaatatgtaacaatagtacgatgcaatgagtaagacaataggaaatctatcttatatacacataattattctatcaattttaccaattagttagtgtaatgttaacaaaaatgtgggagaatctaattagtttttctttacacaattgacgtacatgagtctgagttccttgtttttgctaattatttcatccaatttattattcttgacgatatcgagatcttttgtataggagtcagacttgtattcaacatgcttttctataatcatcttagttatttcggcatcatccaatagtacattttccagattaacagagtagatattaatgtcgtatttgaacagagcctgtaacatctcaatgtctttattatctatagccaatttaatgtccggaatgaagagaagggaattattggtgtttgtcgacgtcatatagtcgagcaagagaatcatcatatccacgtgtccattttttatagtggtgtgaatacaactaaggagaatagccagatcaaaagtagatggtatttctgaaagaaagtatgatacaatacttacatcattaagcatgacggcatgataaaatgaagttttccatccagttttcccatagaacatcagtctccaatttttcttaacaaacagtttcaccgtttgcatgttaccactatcaaccgcataatacaatgcggtgtttcctttgtcatcaaattgtgaatcatccattccactgaatagcaaaatctttactattttggtatcttctaatgtggctgcctgatgtaatggaaattcattctctagaagatttttcaatgctccagcgttcaacaacgtacatactagacgcacgttattatcagctattgcataatacaaggcactatgtccatggacatccgccttaaatgtatctttactagagagaaagcttttcagctgcttagacttccaagtattaattcgtgacagatccatgtctgaaacgagacgctaattagtgtatattttttcattttttataattttgtcatattgcaccagaattaataatatctctaatagatctgattagtagatacatggctatcgcaaaacaacatatacacatttaataaaaataatatttattaagaaaattcagatttcacgtacccatcaatataaataaaataatgattccttccaccgtatccataaacaatattaaggagattctaccttacccataaacaatataaatccagtaatatcatgtctaatgatgaacacaaatggtgtattaaattccagtttttcaggagatgatctcgccgtagctaccatgatagtagatgcctctgctacagttccttgttcgtcgacatctatctttgcattctgaaacattttataaatatataatgggtccctagtcatatgtttaaacgacgcattatctggattaaacatactaggagccatcatttcggctatcgacttaatatccctcttattttcgatagaaaatttagggagtttaagattgtacactttattccctaattgaaacgaccaatagtctaattttgcagccgtaatagaatctgtgaaatgggtcatattatcacctattgccaggtacatactaatattagcatccttatacggaaggcgcaccatatcatattcttcgtcatcgattgtgattgtatttccttgcaatttagtaactacgttcatcatgggaaccgttttcgtaccgtacttattagtaaaactagcattgcgtgttttagtgatatcaaacggatattgccatgtacctttaaaatatatagtattaatgattgcccatagagtattattgtcgagcatattagaatctactacattagacataccggatctacgttctactatagaattaattttattaaccgcatctcgtctaaagtttaatctatataggccgaatctatgatattgttgataatacaacggtttaatgcacacagtattatctacgaaactttgataagttagatcagtgtacgtatatttagatgttttcagcttagctaatcctgatattaattctgtaaatgctggacccagatctctttttctcaaatccatagtcttcaataattctattctagtattacctgatgcaggcaatagcgacataaacatagaaaacgaataaccaaacggtgagaagacaatattatcatcttgaatatttttatacgctactataccggcattggtaaatccttgcagacgataggtagacactgaacacgttaacgatagtatcaataacgcaatcatgattttatggtattaataattaaccttatttttatgttcggtataaaaattattgatgtctacacatccttttgtaattgacatctatatatccttttgtataatcaactctaatcactttaacttttacagttttccctaccagtttatccctatattcaacatatctatccatatgcatcttaacactctctgccaagatagcttcagagtgaggatagtcaaaaagataaatgtatagagcataatccttctcgtatactctgccctttattacatcgcccgcattgggcaacgaataacaaaatgcaagcatcttgttaacgggctcgtaaattgggataaaaattatgtttttatatctattttattcaagagaatattcaggaatttctttttccggttgtatctcatcgcagtatatatcatttgtacattgtttcatattttttaatagtttacaccttttagtaggactagtatcgtacaattcatagctgtattttgaattccaatcacgcataaaaatatcttccaattgttgacgaagacctaatccatcatccggtgtaatattaatagatgctccacatgtatccgtaaagtaatttcctgtccaatttgaggtacctatataggccgttttatcggttaccatatatttggcatggtttaccctagaatacggaatgggaggatcagcatctggtacaataaatagctttacttctatatctatgtttttagattttagcatagcgatagatcttaaaaagtttctcatgataaacgaagatcgttgccagcaactaatcaatagcttaacggatacttgtctgtctatagcggatcttcttaattcatcttctatataaggccaaaacaaaattttacccgccttcgaataaataatagggataaagttcataacagatacataaacgaatttactcgcatttctaatacatgacaataaagcggttaaatcattggttctttccatagtacatagttgttgcggtgcagaagcaataaatacagagtgtggaacaccacttacgttaatactaagaggatgatctgtattataatacgacggataaaagtttttccaattatatggtagattgttaactccaagataccagtatacctcaaaaatttgagtgagatccgctgccaagttcctattattgaagatcgcaatacccaattctttgacctgagttagtgatctccaatccatgttagcgcttcctaaataaatatgtgtattatcagatatccaaaattttgtatgaagaactcctcctaggatatttgtaatatctatgtatcgtacttcaactccggccatttgtagtctttcaacatcctttaatggtttgttagatttattgacggctactctaactcgtactcctcttttgggtaattgtacaatctcgtttaatattatcgtgccgaaattcgtacccacttcatccgataaactccaataaaaagatgatatatctagtgtttttgtggtattggatagaatttccctccacatgttaaatgtagacaaatatactttatcaaattgcatacctataggaatagtctctgtaatcactgcgattgtattatccggattcattttatttgttaaaagaataatcctatatcacttcactctattaaaaatccaagtttctatttctttcatgactgattttttaacttcatccgtttccttatgaagatgatgtttggcaccttcataaatttttatttctctattacaatttgcatgttgcatgaaataatatgcacctgaaacatcactaatctcattgtttgttccctggagtatgagagtcggggggtgttaatcttggaaattatttttctaaccttgttggtagccttcaagacctgactagcaaatccagccttaattttttcatgattgattaatgggtcgtattggtatttataaactttatccatatctctagatactgattctggacatagctttccgactggcgcatttggtgtgatggttcccataagtttggcagctagcagattcagtcttgaaacagcatctgcattaactagaggagacattagaatcattgctgtaaacaagtttggattatcgtaagaggctagtatagaaattgttgctcccatggaatgacccaataagtagatttaatagttaccacgtgctgtaccaaagtcatcaatcatcattttttcaccattacttcttccatgtccaatatgatcatgtgagaatactaaaattcctaacgatgatatgttttcagctagttcgtcataacgtccagaatgtttaccagctccatgacttatgaatactaatgccttaggatatgtaataggtttccaatatatgtaatcattgtccagattgaacatacagtttgcactcatgattcacgttatataactatcaatattaacagttcgtttgatgatcatattatttttatgttttattgataattgtaaaaacatacaattaaatcaatatagaggaaggagacggatactgtcttttgtgagatagtcatggcgactaaattagattatgaggatgctgttttttactttgtggatgatgataaaatatgtagtcgcgactccatcatcgatctaatagatgaatatattacgtggagaaatcatgttatagtgtttaacaaagatattaccagttgtggaagactgtacaaggaattgatgaagttcgatgatgtcgctatacggtactatggtattgataaaattaatgagattgtcgaagctatgagcgaaggagaccactacatcaattttacaaaagtccatgatcaggaaagtttattcgctaccataggaatatgtgctaaaatcactgaacattggggatacaaaaagatttcagaatctagattccaatcattgggaaacattacagatctgatgaccgacgataatataaacatcttgatactttttctagaaaaaaaattgaattgatgatataggggtcttcataacgcataattattacgttagcattctatatccgtgttaaaaaaaattatcctatcatgtatttgagagttttatatgtagcaaacatgatagctgtgatgccaataagctttagatattcacgcgtgctagtgttagggatggtattatctggtggtgaaatgtccgttatataatctacaaaacaatcatcgcatatagtatgcgatagtagagtaaacatttttatagtttttactggattcatacatcgtctacccaattcggttataaatgaaattgtcgccaatcttacacccaaccccttgttatccattagtatagtattaacttcgttatttatgtcataaactgtaaatgattttgtagatgccatatcatacatgatattcatgtccctattataatcattactaactttatcacaatatatgttgataatatctatatatgatctagtctttgtgggcaactgtctatacaagtcgtctaaacgttgtttactcatatagtatcgaacagccatcattacatggtcccgttccgttgatagataatcgagtatgttagtggacttgtcaaatctatataccatattttctggaagtggatatacatagtcgtgatcaacattattgctagcctcatcttctatatcctgtactataccattatctatatcatctacataatctacgatattattacacataaacatcgacaacatactattgtttattatctaagtcctgttgatccaaacccttgatctcctctatttgtactatctagagattgtacttcttccagttctggataatatatacgttgatagattagctgagctattctatctccagtatttacattaaacgtacattttccattattaataagaatgactcctatgtttcccctataatcttcgtctattacaccacctcctatatcaatgccttttagtgacagaccagacctaggagctattctaccatagcaaatcttaggcatggacatactaatatctgtcttaattaactgtctttctcctggagggatagtataatcgtaagcgctatacaaatcatatccggcagcacccggcgattgcctagtaggagatttagctctgttagtttccttaacaaatctaactggtgagttaatattcatgttgaacataaaactaatattttatttcaaaattatttaccatcccatatattccatgaataagtgtgatgattgtacacttctatagtatctatatacgatccacgataaaatcctcctatcaatagcagtttattatccactatgatcaattctggattatccctcggataaataggatcatctatcagagtccatgtattgctggattcacaataaaattccgcatttctaccaaccaagaataaccttctaccgaacactaacgcgcatgatttataatgaggataataagtggatggtccaaactgccactgatcatgattgggtagcaaatattctgtagttgtatcagtttcagaatgtcctcccattacgtatataacattgtttatggatgccactgctggattacatctaggtttcagaagactcggcatattaacccaagcagcatccccgtggaaccaacgctcaacagatgtgggatttggtagacctcctactacgtataatttattgttagcgggtatccccgtagcatacagtctggggctattcatcggaggaattggaatccaattgtttgatatataatttacagctatagcattgttatgtatttcattgttcatccatccaccgatgagatatactacttctccaacatgagtacttgtacacatatggaatatatctataatttgatccatgttcataggatactctatgaatggatacttgtatgatttgcgtggttgtttatcacaatgaaatattttggtacagtctagtatccattttacattatttatacctctgggagaaagataatttgacctgattacatttttgataaggagtagcagatttcctaatttatttcttcgctttatataccacttaatgacaaaatcaactacataatcctcatctggaacatttagttcatcgctttctagaataagtttcatagatagataatcaaaattgtctatgatgtcatcttccagttccaaaaagtgtttggcaataaagtttttagtatgacataagagattggatagtccgtattctatacccatcatgtaacactcgacacaatattcctttctaaaatctcgtaagataaagtttatacaagtgtagatgataaattctacagaggttaatatagaagcacgtaataaattgacgacgttatgactatctatatatacctttccagtatacgagtaaataactatagaagttaaactgtgaatgtcaaggtctagacaaacccttgtaactggatctttatttttcgtgtatttttgacgtaaatgtgtgcgaaagtaaggagataactttttcaatatcgtagaattgactattatattgccacctatagcatcaataattgttttgaatttcttagtcatagacaatgctaatatattcttacagtacacagtattgacaaatatcggcatttatgtttctttaaaagtcaacatctaaagaaaaatgattatcttcttgagacataactcccattttttggtattcacccacacgtttttcgaaaaaattagtttttccttccaatgatatattttccatgaaatcaaacggattggtaacattataaatttttttaaatcccaattcagaaatcaatctatccgcgacaaattctatatatgttttcatcatttcacaattcattcctataagtttaactggaagagccgcagtaagaaattcttgttcaatggatactgcatctgttataatagatctaacggtttcttcactcggtggatacaataaatgtttaaacatcaaacatgcgaagtcgcagtgcagaccctcgtctctactaattagttcgttggaaaacgtgagtccgggcattaggccacgctttttaagccaaaatatggaagcgaatgatccggaaaagaagattccttctactgcagcaaaggcaataagtctctctccataaccggcgctgtcatgtatccacttttgagcccaatcggccttcttttttacacaaggcattgtttctatggcattaaagagatagtttttttcattactatctttaacataagtatcgatcaaaagactatacatttccgaatgaatgttttcaatggccatctgaaatccgtagaaacatctagcctcggtaatctgtacttctgtacaaaatcgttccgccaaattttcattcactattccgtcactggctgcaaaaaacgccaatacatgttttataaaatatttttcgtctggtgttagtttattccaatcattgatatctttagatatatctacttcttccactgtccaaaatgatgcctctgcctttttatacatgttccagatgtcataatattggattgggaaaataacaaatctatttggatttggtgcaaggatgggttccataactaaattaacaatatcaataaattttttttcagttatctatatgcctgtacttggattttttgtacatcgatatcgccgcaatcactacaataattacaagtattattgatagcattgttattagtactatcataattaaattatcgacattcatgggtgctgaataatcgttattatcatcattatcattttgtaattgtgacatcatactagataaatcgtttgcgagattgttgtgggaagcgggcatggaggatgcattatcattattatttaacgccttccattcggattcacaaatatggcgcgcgttcaacattttatggaaactataattttgtgaaaacagataacaagaaaactcgtcatcgttcaaatttttaacgatagtaaaccgattaaacgtcgagctaatttctaacgctagcgactctgttggatatgggtttccagatatatatcttttcagttcccctacgtatctataatcatctgtaggaaatggaagatatttccatttatctactgttcctaatatcatatgtggtggtgtagtagaaccattaagcgcgaaagatgttatttcgcatcgtattttaacttcgcaataatttctggttagataacgcactctaccagtcaagtcaatgatattagcctttacagatatattcatagtagtcgtaacgatgactccatcttttagatgcgatactcctttgtatgtaccagaatcttcgtacctcaaactcgatatatttaaacaagttaatgagatattaacgcgttttatgaatgatgatatataaccagaagttttatcctcggtggctagcgctataaccttatcattataataccaactagtgtgattaatatgtgacacgtcagtgtgggtacaaatatgtacattatcgtctacgtcgtattcgatacatccgcatacagccaacaaatataaaatgacaaatactctaacgacgttcgtacccatcttgatgcggtttaataaatgttttgatttcaatttattgtaaaaaaagattcggttttatactgttcgatattctcattgcttatattttcatctatcatctccacacagtcaaatccgtggttagcatgcacctcatcaaccggtaaaagactatcggactcttctatcattataactctagaatatttaatttggtcattattaatcaagtcaattatcttatttttaacaaacgtgagtattttactcattttttataaaaacttttagaaatatacagactctatcgtgtgtctatatcttctttttatatccaatgtatttatgtctgatttttcttcatttatcatatataatggtccaaattctacacgtgcttcggattcatccagatcattaaggttcttataattgtaacatccttctcttccctcttctacatcttccttcttattcttattcttattcttattcttattcttattcttattcttattcttagcgtcacagaatctaccacagcagaatcccatgacgagcgtcatattaaactaattcattttcaattataatatacgattagtaatgaccattaaaataaaaaatattcttcataaccggcaagaaagtgaaaagttcacattgaaactatgtcagtagtatacatcatgaaatgatgatatatatattctctattttggtggaggattatatgatataattcgtggataatcattcttaagacacatttcttcattcgtaaatcttttcacgttaaatgagtgtccatattttgcaatttcttcatatgatggcggtgtacgtggacgaggctgctcctgttcttgttgtggtcgccgactatcgtgtttgcgtttagatccctccattatcgcgattgcgtagatggagtactattttataccttgtaattaaatttttttattaattaaacgtataaaaacgttccgtatctgtatttaagagccagatttcgtctaatagaacaaatagctacagtaaaaataactagaataattgctacacccactagaaaccacggatcgtaatacggcaatcggttttcgataataggtggaacgtatattttatttaaggacttaacaattgtctgtaaaccacaatttgcttcagcggatcctgtattaactatctgtaaaagcatatgttgaccgggcggagccgaacattctccgatatctaatttctgtatatctataatattattaacctccgcatacgcattacagttcttttctagcttggataccgcactaggtacatcgtctagatctattcctatttcctcagcgatagctcttctatccttttccggaagcaatgaaatcacttcaataaatgattcaaccatgagtgtgaaactaagtctagaattactcatgcatttgttagttattcggagcgcgcaatttttaaactgtcctataacctctcctatatgaatagcacaagtgacattagtagggatagaatgttgagctaatttttgtaaataactatctataaaaagattatacaaagttttaaactctttagtttccgccatttatccagtctgagaaaatgtctctcataataaatttttccaagaaactaattgggtgaagaatggaaacctttaatctatatttatcacagtctgttttggtacacatgatgaattcttccaatgccgtactaaattcgatatctttttcgatttctggatatgtttttaataaagtatgaacaaagaaatggaaatcgtaataccagttatgtttaactttgaaattgttttttattttcttgttaatgattccagccacttgggaaaagtcaaagtcgtttaatgccgatttaatacgttcattaaaaacaaactttttatcctttagatgaattattattggttcattggaatcaaaaagtaagatattatcgggtttaagatctgcgtgtaaaaagttgtcgcagcatggtagttcgtagattttaatgtataacagagccatctgtaaaaagataaactttatgtattgtaccaaagatttaaatcctaatttgatagctaactcggtatctactttatctgccgaatacagtgctaggggaaaaattataatgtttcctctttcatattcgtagttagttctcttttcatgttcgaaaaagtgaaacatgcggttaaaatagtttataacattaatattactgttaataactgccgggtaaaagtgggatagtaatttcacgaatttgatactgtcctttctctcgttaaacgcctttagaaaaactttagaagaatatctcaatgagagttcctgaccatccatagtttgtatcaataatagcaacatatgaagaacacgtttatacagagtatgtaaaaatgttaatttatagtttaatcccatggcccacgcacacacgattaattttttttcatctccctttagattgttgtatagaaatttgggtactgtgaactccgccgtagtttccatgggactatataattttgtggcctcgaatacaaattttactacatagttatctatcttaaaaactataccatatcctcctgtagatatgtgataaaaatcgtcgtttataggataaaatcgtttatccttttgttggaaaaatgatgaattaatgtaatcattctcttctatctttagtagtgtttccctattaaaattcttaaaataatttaacaatctaactgacggagcccaattttggtgtaaatctaattgggacattatgttgttaaaatataaacagtctcctaatataacagtatctgataatctatggggagacatccattgatattcaggggatgaatcattggcaacacccatttattgtacaaaaagccccaatttacaaacgaaagtccaggtttgatagagacaaactattaactattttgtctctgtttttaacacctccacagtttttaatttctttggtaatgaaattattcacaatatcagtatcttctttatctaccagagattttactaacttgataaccttggctgtctcattcaatagggtagtaatatttgtatgtgtgatattgatatctttttgaattgtttcttttagaagtgattctttgatggtgtcagcatacgaattacaataatgcagaaactcggttaacatgcaggaattatagtaagccaattccaattgttgcctgtgttgtattagagtgtcaatatgagcaatggtgtccttgcgtttctctgatagaatgcgagcagcgattttggcgttatcatttgacgatatttctggaatgacgaatcctgtttctactaactttttggtaggacaaagtgaaacaatcaagaagatagcttctcctcctatttgtggaagaaattgaactcctctagatgatctactgacgatagtatctccttgacagatattggaccgaattacagaagtacctggaatgtaaagccctgaaaccccctcattttttaagcagattgttgccgtaaatcctgcactgtgaccaagatagagagctcctttggtgaatccatctctatgtttcagtttaaccaagaaacagtcagctggtctaaaatttccatctctatctaatacagcatctaacttgatgtcaggaactatgaccggtttaatgttatatgtaacattgagtaaatccttaagttcataatcatcactgtcatcagttatgtacgatccaaacaatgtttctaccggcatagtggatacgaagatgctatccatcagaatgtttccctgattagtattttctatatagctattcttctttaaacgattttccaaatcagtaactatgttcatttttttaggagtaggacgcctagccagtatggaagaggattttctagatcctctcttcaacatctttgatctcaatggaatgcaaaaccccatagtgaaacaaccaacgataaaaataatattgtttttcactttttataattttaccatctgactcatggattcattaatatctttataagagctactaacgtataattctttataactgaactgagatatatacaccggatctatggtttccataattgagtaaatgaatgctcggcaataactaatggcaaatgtatagaacaacgaaattatactagagttgttaaagttaatattttctatgagctgttccaataaattatttgttgtgactgcgttcaagtcataaatcatcttgatactatccagtaaaccgtttttaagttctggaatattattatcccattgtaaagcccctaattcgactatcgaatatcctgctctgatagcagtttcaatatcgacggacgtcaatactgtaataaaggtggtagtattgtcatcatcgtgataaactactggaatatggtcgttagtaggtacggtaactttacacaacgcgatatataactttccttttgtaccatttttaacgtagttgggacgtcctgcagggtattgttttgaagaaatgatatcgagaacagatttgatacgatatttgttggattcctgattatttactataatataatctagacagatagatgattcgataaatagagaaggtatatcgttggtaggataatacatccccattccagtattctcggatactctattaatgacactagttaagaacatgtcttctattctagaaaacgaaaacatcctacatggactcattaaaacttctaacgctcctgattgtgtctcgaatgcctcgtacaaggatttcaaggatgccatagattctttgaccaacgatttagaattgcgtttagcatctgatttttttattaaatcgaatggtcggctctctggtttgctaccccaatgataacaatagtcttgtaaagataaaccgcaagaaaatttatacgcatccatccaaataaccctagcaccatcggatgatattaatgtattattatagattttccatccacaattattgggccagtatactgttagcaacggtatatcgaatagattactcatgtaacctactagaatgatagttcgtgtactagtcataatatctttaatccaatctaagaaatttaaaattagattttttacactgttaaagttaacaaaggtattacccgggtacgtggatatcatatatggtattggtccattatcagtaatagctccataaactgatacggcgatggtttttatatgtgtttgatctaacgaggaagaaattcgcacccacaattcatctctagatatgtatttaatatcaaacggtaacacatcaatttcgggacgcgtatatgtttctaaatttttaatccaaatataatgatgacctatatgccctattatcatactgtcaactatagtacacctagagaacttacgatacatctgtttcctataatcgttaaattttacaaatctataacatgctaaaccttttgacgacaaccattcattaatttctgatatggaatctgtattctcgataccgtattgttctaaagccagtgctatatctccctgttcgtgggaacgctttcgtataatatcgatcaacggataatctgaagtttttggagaataatatgactcatgatctatttcgtccataaacaatctagacataggaattggaggcgatgatcttaattttgtgcaatgagtcgtcaatcctataacttctaatcttgtaatattcatcatcgacataatactatctatgttatcatcgtatattagtataccatgaccttcttcatttcgtgccaaaatgatatacagtcttaaatagttacgcaatatctcaatagtttcataattgttagctgttttcatcaagatttgtaccctgtttaacatgatggcgttctatacgtttctattttctattttttaaatttttaaatttttaacgatttactgtggctagatacccaatctctctcaaatatttttttagcctcgcttacaagctgtttatctatactattaaaactgacgaatccgtgattttggtaatgggttccgtcgaaatttgccgaagtgatatgaacatattcgtcgtcgactatcaacaattttgtattattctgaatagtgaaaaccttcacagatagatcattttgaacacacaacgcgtctagacttctggcggttgccatagaatatacgtcgttcttatcccaattaccaactagaagtctgatcttaactcctctattaatggctgcttctataatggagttgtaaatatcgggccaatagtagctattaccgtcgacacgtgtagtgggaactatggccaaatgttcaatatctatactagtcttagctgacctgagtttatcaataactacatcggtatctagatctctagaatatcccaataggtgttccggagaatcagtaaagaacactccacctataggattcttaatatgatacgcagtgctaactggcagacaacaagccgcagagcataaattcaaccatgaattttttgcgctattaaaggctttaaaagtatcaaatcttctacgaagatctgtggccagcgggggataatcagaatatacacctaacgttttaatcgtatgtatagatcctccagtaaatgacgcgtttcctacataacatctttcatcatctgacacccaaaaacaaccgagtagtagtcccacattattttttttatctatattaacggttataaaatttatatccgggcagtgactttgtagctctcccagatttcttttccctcgttcatctagcaaaactattattttaatccctttttcagatgcctcttttagtttatcaaaaataagcgctcccctagtcgtactcagaggattacaacaaaaagatgctatgtatatatatttcttagctagagtgataatttcgttaaaacattcaaatgttgttaaatgatcggatctaaaatccatattttctggtagtgtttctaccagcctacattttgctcccgcaggtaccgatgcaaatggccacatttagttaacataaaaacttatacatcctgttctatcaacgattctagaatatcatcggctatatcgctaaaattttcatcaaagtcgacatcacaacctaactcagtcaatatattaagaagttccatgatgtcatcttcgtctatttctatatccgtatccattgtagattgttgaccgattatcgagtttaaatcattactaatactcaatccttcagaatacaatctgtatttcattgtaaatttataggcggtgtatttaagttggtagattttcaattatgtatcaatatagcaacagtagttcttgctcctccttgattctagcatcctcttcattattttcttctacgtacataaacatgtccaatacgttagacaacacaccgacgatggcggccgccacagacacgaatatgactagaccgatgaccatttaaaaacccctctctagctttcacttaaactgtatcgatcattcttttagcacatgtataatataaaaaaacattattctatttcgaatttaggcttccaaaaatttttcatccgtaaaccgataataatatatatagacttgttaatagtcggaataaatagattaatgcttaaactatcatcatctccacgattagagatacaatatttacattctttttgctgtttcgaaactttatcaatacacgttaatacaaacccaggaaggagatattgaaactgaggctgttgaaaatgaaacggtgaatacaataattcagataatgtaaaatcatgattccgtattctgatgatattagaactgctaatggatgtcgatggtatgtatctaggagtatctattttaacaaagcatcgatttgctaatatacaattatcattttgattaattgttattttattcatattcttaaaaggtttcatatttatcaattcttctacattaaaaatttccatttttaatttatgtagccccgcaatactcctcattacgtttcattttttgtctataatatccattttgttcatctcggtacatagattatccaattgagaagcgcatttagtagttttgtacattttaagtttattgacgaatcgtcgaaaactagttatagttaacattttattatttgataccctgatattaatacccctgccgttactattatttataactgatgtaacccacgtaacattggaattaactatcgatagtaatgcatcgacgcttccaaaattgtctattataaactcaccgataatttttttattacatgttttcatattcattaggattatcaaatctttaatcttactacgattgtatgcgttgatattacaagacgtcattctaaaagacggaggatttccatcaaatgccagacaatcacgtacaaagtacatggaaataggttttgttctattgcgcatcatagattcatatagaacacccgtagaaatactaatttgttttactctataaaatactaatgcatctatttcatcgttttgtataacgtctttccaagtgtcaaattccaaatttttttcattgatagtaccaaattcttctatctctttaactacttgcatagataggtaattacagtgatgcctacatgccgttttttgaaactgaatagatgcgtctagaagcgatcgtacgctagtcacaatcaccactttcatatttagaatatatgtatgtaaaaatatagtagaatttcattttgtttttttctatgctataaatgaattctcattttgcatctgctcatactccgttttatatcaataccaaagaaggaagatatctggttctaaaagccgttaaagtatgcgatgttagaactgtagaatgcgaaggaagtaaagcttcctgcgtactcaaagtagataaaccctcatcacccgcgtgtgagagaagaccttcgtccccgtccagatgcgagagaatgaataaccctggaaaacaagtcccgtttatgaggacggacatgctacaaaatatgttcgcggctaatcgcgataatgtagcttctagacttttgaactaaaatacaattatatctttttcgatattaataaatccgtgtcgtccaggttttttatctctttcagtatgtgaatagataggtattttatctctattcatcatcgaatttaagagatccgataaacattgtttgtattctccagatgtcagcatctgatacaacaatatatgtgcacataaacctctggcacttatttcatgtaccttccccttatcactaaggagaatagtatttgagaaatatgtatacatgatattatcatgaattagatatacagaatttgtaacactctcgaaatcacacgatgtgtcggcgttaagatctaatatatcactcgataacacattttcatctagatacactagacattttttaaagctaaaatagtctttagtagtgacagtaactatgcgattattttcatcgatgatacatttcatcggcatattattacgcttaccatcaaagactataccatgtgtatatctaacgtattctagcatagttgccatacgtgcattaaacttttcaggatctttggatagatcttccaatctatctatttgagaaaacatttttatcatgttcaatagttgaaacgtcggatccactatatagatattatctataaagattttaggaactacgttcatggtatcctggcgaatattaaaactatcaatgatatgattatcgttttcatcttttatcaccatatagtttctaagatatgggattttacttaatataatattatttcccgtaataaattttattagaaatgccaaatctataagaaaagtcctcgaattagtttgaagaatatctatatcgccgtaccgtatatttggattaattagatatagagaatatgatccgtaacatatacaacttttattatggcgtctaagatattcttccatcaacttattaacatttttgactagggaagatacattatgacgtcccattacttttgccttgtctattattgcgacgttcatagaatttagcatatctcttgccaattcttccattgatgttacattataagaaattttagatgaaattacatttggagctttaatagtaagaactcctaatatgtccgtgtatgtggtcactaatacagattgtagttctataatcgtaaataatttacctatattatatgtttgagtctgtttagaaaagtagctaagtatacgatcttttatttctgatgcagatgtatcaacatcggaaaaaaatctttttttattcttttttactaaagatacaaatatgtctttgttaaaaacagttattttttgaatatttctagcttgtaattttaacatatgatattcattcacactaggtactctgcctaaataggtttctataatctttaatgtaatattaggaaaagtattctgatcaggattcctattcattttgaggatttaaaactctgattattgtctaatatggtctctacgcaaactttttcacagagcgatagagtttttgataactcgtttttcttaagaaatataaaactactgtctccagagctcgctctatcttttattttatttaattcgatacaaactcctgatactggttcagaaagtaattcattaattttcagtcctttatagaagatatttaatatagataatacaaaatcttcagtttttgatatcgatctgattgatcctagaactagatatattaataacgtgctcattaggcagtttatggcagcttgataattagatatagtatattccagttcatatttattagataccgcattgcccagattttgatattctatgaattcctctgaaaataaatccaaaataactaaacattctattttttgtggattagtgtactctcttccctctatcatgttcactactggtgtccacgatgataaatatctagagggaatataatatagtccataggatgccaatctagcaatgtcgaataactgtaatttgattcttcgttcttcattatgaattgattcttgaggtataaacctaacacaaattatattattagacttttcgtatgtaatgtctttcatgttataagtttttaatcctggaatagaatctattttaatgaggcttttaaacgcagagttctccaacgagtcaaagcataatactctgttgtttttcttatatacgatgttacgattttcttctttgaatggaataggtttttgaattagtttataattacaacataatagataaggaagtgtgcaaatagtacgcggaaaaaacataatagctcccctgttttcatccatggttttaagtaaatgatcactggcttctttagttaatggatattcgaacattaaccgtttcatcatcattggacagaatccatatttcttaatgtaaagagtgatcaaatcattgtgtttattgtaccatcttgttgtaaatgtgtattcggttatcggatctgctcctttttctattaaagtatcgatgtcgatctcgtctaagaattcaactatatcgacatatttcatttgtatacacataaccattactaacgtagaatgtataggaagagatgtaacgggaacagggtttgttgattcgcaaactattctaatacataattcttctgttaatacgtcttgcacgtaatctattatagatgccaagatatctatataattattttgtaagatgatgttaactatgtgatctatataagtagtgtaataattcatgtatttcgatatatgttccaactctgtctttgtgatgtctagtttcgtaatatctatagcatcctcaaaaaatatattcgcatatattcccaagtcttcagttctatcttctaaaaaatcttcaacgtatggaatataataatctattttacctcttctgatatcattaatgatatagtttttgacactatcttctgtcaattgattcttattcactatatctaagaaacggatagcgtccctaggacgaactactgccattaatatctctattatagcttctggacataattcatctattataccagaattaatgggaactattccgtatctatctaacatagttttaagaaagtcagaatctaagacctgatgttcatatattggttcatacatgaaatgatctctattgatgatagtgactatttcattctctgaaaattggtaactcattctatatatgctttccttgttgatgaaggatagaatatactcaatagaatttgtaccaacaaactgttctcttatgaatcgtatatcatcatctgaaataatcatgtaaggcatacatttaacaattagagacttgtctcctgttatcaatatactattcttgtgataatttatgtgtgaggcaaatttgtccacgttctttaattttgttatagtagatatcaaatccaatggagctacagttcttggcttaaacagatatagtttttctggaacaaattctacaacattattataaaggactttgggtagataagtgggatgaaatcctattttaattaatgctatcgcattgtcctcgtgcaaatatccaaacgcttttgtgatagtatggcattcattgtctagaaacgctctacgaatatctgtgacagatatcatctttagagaatatactagtcgcgttaatagtactacaatttgtattttttaatctatctcaataaaaaaattaatatgtatgattcaatgtataactaaactactaactgttattgataactagaatcagaatctaatgatgacgtaaccaagaagtttatctactgccaatttagctgcattatttttagcatctcgtttagattttccatctgccttatcgaatactcttccgtcgatgtctacacaggcataaaatgtaggagagttactaggcccaactgattcaatacgaaaagaccaatctctcttagttatttggcagtactcattaataatggtgacagggttagcatctttccaatcaataatttttttagccggaataacatcatcaaaagacttatgatcctctctcattgatttttcgcgggatacatcatctattatgacgtcagccatagcatcagcatccggcttatccgcctccgttgtcataaaccaacgaggaggaatatcgtcggagctgtacaccatagcactacgttgaagatcgtacagagctttattaacttctcgcttctccatattaagttgtctagttagttgtgcagcagtagctccttcgattccaatgtttttaatagccgcacacacaatctctgcgtcagaacgctcgtcaatatagatcttagacatttttagagagaactaacacaaccagcaataaaactgaacctactttatcatttttttattcatcatcctctggtggttcgtcgtttctatcgaatgtagctctgattaacccgtcatctataggtgatgctggttctggagattctggaggagatggattattatctggaagaatctctgttatttccttgttttcatgtatcgattgcgttgtaacattaagattgcgaaatgctctaaatttgggaggcttaaagtgttgtttgcaatctctacacgcgtgtctaactagtggaggttcgtcagctgctctagtttgaatcatcatcggcgtagtattcctacttttacagttaggacacggtgtattgtatttctcgtcgagaacgttaaaataatcgttgtaactcacatcctttattttatctatattgtattctactcctttcttaatgcattttataccgaataagagatagcgaaggaattctttttcggtgccgctagtacccttaatcatatcacatagtgttttatattccaaatttgtggcaatagacggtttatttctatacgatagtttgtttctggaatcctttgagtattctataccaatattattctttgattcgaatttagtttcttcgatattagattttgtattacctatattcttgatgtagtactttgatgatttttccatggcccattctattaagtcttccaagttggcatcatccacatattgtgatagtaattctcggatatcagtagcggctaccgccattgatgtttgttcattggatgagtaactactaatgtatacattttccatttataacacttatgtattaactttgttcatttatattttttcattattatgttgatattaacaaaagtgaatatatatgttaataattgtattgtggttatacggctacaatttcataatgagtggaagtcagtgtccgatgatcaatgacgatagctttactctgaaaagaaagtatcaaatcgatagtgcggagtcaacaatgaaaatggataagaagaggacaaagtttcagaatagagccaaaatggtaaaagaaataaatcagacaataagagcagcacaaactcattacgagacattgaaactaggatacataaaatttaagagaatgattaggactactactctagaagatatagcaccatctattccaaataatcagaaaacttataaactattctcggacatttcagccatcggcaaagcatcacagaatccgagtaagatggtatatgctctgctgctttacatgtttcccaatttgtttggagatgatcatagattcattcgttatagaatgcatccaatgagtaaaatcaaacacaagatcttctctcctttcaaacttaatcttattagaatattagtggaagaaagattctataataatgaatgcagatctaataaatggagaataattggaacacaagttgataaaatgttgatagctgaatctgataaatatacaatagatgcaaggtataacctaaaacccatgtatagaatcaagggaaaatctgaagaagataccctcttcatcaaacagatggtagaacaatgtgtgacatcccaggaattggtggaaaaagtgttgaagatactgtttagagatttgttcaagagtggagaatacaaagcgtacagatacgatgatgatgtagaaaatggatttattggattggatacactaaaattaaacattgttcatgatatagttgaaccatgtatgcctgttcgtaggccagtggctaagatactgtgtaaagaaatggtaaataaatactttgagaatccgctacatattattggtaaaaatcttcaagagtgcattgactttgttagtgaataggcatttcatctttctccaatactaattcaaattgttaaattaataatggatagtataaatagttattagtgataaaatagtaaaaataattattagaataagagtgtagtatcatagataactctcttctataaaaatggattttattcgtagaaagtatcttatatacacagtagaaaataatatagattttttaaaggatgatacattaagtaaagtaaacaattttaccctcaatcatgtactagctctcaagtatctagttagcaattttcctcaacacgttattactaaggatgtattagctaataccaatttttttgttttcatacatatggtacgatgttgtaaagtgtacgaagcggttttacgacacgcatttgatgcacccacgttgtacgttaaagcattgactaagaattatttatcgtttagtaacgcaatacaatcgtacaaggaaaccgtgcataaactaacacaagatgaaaaatttttagaggttgccgaatacatggacgaattaggagaacttataggcgtaaattatgacttagttcttaatccattatttcacggaggggaacccatcaaagatatggaaatcatttttttaaaactgtttaagaaaacagacttcaaagttgttaaaaaattaagtgttataagattacttatttgggcttacctaagcaagaaagatacaggcatagagtttgcggataatgatagacaagatatatacactctatttcaacaaactggtagaatcgtccatagcaatctaacagaaacgtttagagattatatctttcccggagataagactagctattgggtgtggttaaacgaaagtatagctaatgatgcggatattgttcttaatagacacgccattaccatgtatgataaaattcttagttatatatactctgagataaaacaaggacgcgttaataaaaacatgcttaagttagtttatatctttgagcctgaaaaagatatcagagaacttctgctagaaatcatatatgatattcctggagatatcctatctattattgatgcaaaaaacgacgattggaaaaaatattttattagtttttataaagctaattttattaacggtaatacatttattagtgatagaacgtttaacgaggacttattcagagttgttgttcaaatagatcccgaatatttcgataatgaacgaattatgtctttattctctacgagtgctgcggacattaaacgatttgatgagttagatattaataacagttatatatctaatataatttatgaggtgaacgatatcacattagatacaatggatgatatgaagaagtgtcaaatctttaacgaggatacgtcgtattatgttaaggaatacaatacatacctgtttttgcacgagtcggatcccatggtcatagagaacggaatactaaagaaactgtcatctataaaatccaagagtaaacggctgaacttgtttagcaaaaacattttaaaatattatttagacggacaattggctcgtctaggtcttgtgttagatgattataaaggagacttgttagttaaaatgataaaccatcttaagtctgtggaggatgtatccgcattcgttcgattttctacagataaaaaccctagtattcttccatcgctaatcaaaactattttagctagttataatatttccatcatcgtcttatttcaaaggtttttgagagataatctatatcatgtagaagaattcttggataaaagcatccatctaaccaagacggataagaaatatatacttcaattgataagacacggtagatcatagaacagaccaaatatattattaataatttggtatatacatagatattaattatcacatattaaaaattcacacatttttgataaatgggaactgctgcaacaattcagactcccaccaaattaatgaataaagaaaatgcagaaatgattttggaaaaaattgttgatcatatagttatgtatattagtgacgaatcaagtgattcagaaaataatcctgaatatattgattttcgtaacagatacgaagactatagatctctcattataaaaagtgatcacgagtttgtaaagctatgtaaaaatcatgcagagaaaagttctccagaaacgcaacaaatgattatcaaacacatatacgaacaatatcttattccagtatctgaagtactattaaaacctataatgtccatgggtgacataattacatataacggatgtaaagacaatgaatggatgctagaacaactctctaccctaaactttaacaatctccgcacatggaactcatgtagcataggcaatgtaacgcgtctgttttatacattttttagttatctgatgaaagataaactaaatatataagtataatcccattctaatactttaacctgatgtattagcatcttattagaatattaacctaactaaaagacataacataaaaactcattacatagttgataaaaagcggtaggatataaatattatggctgccaccgttccgcgttttgacgacgtgtacaaaaatgcacaaagaagaattctagatcaagaaacattttttagtagaggtctaagtagaccgttaatgaaaaacacatatctatttgataattacgcgtatggatggataccagaaactgcaatttggagtagtagatacgcaaacttagatgcaagtgactattatcccatttcgttgggattacttaaaaagttcgagtttctcatgtctctatataaaggtcctattccagtatacgaagaaaaagtaaatactgaattcatagccaatggatcgttctctggtagatacgtatcatatcttcgaaagttttctgctcttccaacaaacgagtttattagttttttattattgacctccatccctatctataatatcttattctggtttaaaaacacacagtttgatattactaaacacacattattcagatacgtctatacagataatgccaaacacctggcgttggctaggtatatgcatcaaacaggagactataagcctttgtttagtcgtctcaaagagaattatatatttaccggtcccgttccaatatgtatcaaagatatagatcaccctaatcttagtagagcaagaagtccatccgattatgagacattagctaatattagtactatattgtactttaccaagtatgatccggtattaatgtttttattgttttacgtacctgggtattcaattactacaaaaattactccagccgtagaatatctaatggataaactgaatctaacaaagagcgacgtacaactgttgtaaattattttatgcttcgtaaaatgtaggttttgaaccaaacattctttcaaagaatgagatgcataaaactttattatccaatagattgactatttcggacgtcaatcgtttaaagtaaacttcgtaaaatattctttgatcactgccgagtttaaaacttctatcgataattgtctcatatgttttaatatttacaagttttttggtccatggtacattagccggacaaatatatgcaaaataatatcgttctccaagttctatagtttctggattatttttattatattcagtaaccaaatacatattagggttatctgcggatttataatttgagtgatgcattcgactcaacataaataattctagaggagacgatctactatcaaattcggatcgtaaatctgtttctaaagaacggagaatatctatacatacctgattagaattcatccgtccttcagacaacatctcagacagtctggtcttgtatgtcttaatcatattcttatgaaacttggaaacatctcttctagtttcactagtacctttattaattctctcaggtacagattttgaattcgacgatgctgagtatttcatcgttgtatatttcttcttcgattgcataatcagattcttatataccgcctcaaactctattttaaaattattaaacaatactctattattaatcagtcgttctaactctttcgctatttctatagacttatcgacatcttgactgtctatctctgtaaacacggagtcggtatctccatacacgctacgaaaacgaaatctgtaatctataggcaacgatgttttcacaatcggattaatatctctatcgtccatataaaatggattacttaatggattggcaaaccgtaacataccgttagataactctgctccatttagtaccgattctagatacaagatcattctacgtcctatggatgtgcaactcttagccgaagcgtatgagtatagagcactatttctaaatcccatcagaccatatactgagttggctactatcttgtacgtatattgcatggaatcatagatggccttttcagttgaactggtagcctgttttaacatctttttatatctggctctctctgccaaaaatgttcttaatagtctaggaatggttccttctatcgatctatcgaaaattgctatttcagagatgaggttcggtagtctaggttcacaatgaaccgtaatatatctaggaggtggatatttctgaagcaatagctgattatttatttcttcttccaatctattggtactaacaacgacaccgactaatgtttccggagatagatttccaaagatacacacattaggatacagactgttataatcaaagattaatacattattactaaacattttttgttttggagcaaataccttaccgccttcataaggaaacttttgttttgtttctgatctaactaagatagttttagtttccaacaatagctttaacagtggacccttgatgactgtactcgctctatattcgaataccatggattgaggaagcacatatgttgacgcacccgcgtctgtttttgtttctactccataatactcccacaaatactgacacaaacaagcatcatgaatacagtatctagccatatctaaagctatgtttagattataatccttatacatctgagctaaatcaacgtcatcctttccgaaagataatttatatgtatcattaggtaaagtaggacataatagtacgactttaaatccattttcccaaatatctttacgaattactttacatataatatcctcatcaacagtcacataattacctgtggttaaaacctttgcaaatgcagcggctttgcctttcgcgtctgtagtatcgtcaccgataaacgtcatttctctaactcctctatttaatactttacccatgcaactgaacgcgttcttggatatagaatccaatttgtacgaatccaatttttcagatttttgaatgaatgaatatagatcgaaaaatatagttccattattgttattaacgtgaaacgtagtattggccatgccgcctactcccttatgactagactgatttctctcataaatacagagatgtacagcttcctttttgtccggagatctaaagataatcttctctcctgttaataactctagacgattagtaatatatctcagatcaaagttatgtccgttaaaggtaacgacgtagtcgaacgttagttccaacaattgtttagctattcgtaacaaaactatttcagaacatagaactagttctcgttcgtaatccatttccattagtgactgtatcctcaaacatcctctatcgacggcttcttgtatttcctgttccgttaacatctcttcattaatgagcgtaaacaataatcgtttaccacttaaatcgatataacagtaacttgtatgcgagattgggttaataaatacagaaggaaacttcttatcgaagtgacactctatatctagaaataagtacgatcttgggatatcgaatctaggtatttttttagcgaaacagttacgtggatcgtcacaatgataacatccattgttaatctttgtcaaatattgctcgtccaacgagtaacatccgtctggagatatcccgttagaaatataaaaccaactaatattgagaaattcatccatggtggcattttgtatgctgcgtttctttggctcttctatcaaccacatatctgcgacggagcattttctatctttaatatctagattataacttattgtctcgtcaatgtctatagttctcatctttcccaacggcctcgcattaaatggaggaggagacaatgactgatatatttcgtccgtcactacgtaataaaagtaatgaggaaatcgtataaatacggtctcaccatttcgacatctggatttcagatataaaaatctgttttcaccgtgactttcaaaccaattaatgcaccgaacatccatttatagaatttagaaatatattttcatttaaatgaatcccaaacattggggaagagccgtatggaccattatttttatagtactttcgcaagcgggtttagacggcaacatagaagcgtgtaaacgaaaactatatactatagttagcactcttccatgtcctgcatgtagacggcacgcgactattgctatagaggacaataatgtcatgtctagcgatgatctgaattatatttattattttttcatcagattatttaacaatttggcatctgatcccaaatacgcaatcgatgtgtcaaaggttaaacctttataaacttaacccattataaaacttatgattagtcacgactgaaataaccgcgtgattattttttggtataattctacacggcatggtttctgtgactatgaattcaacccccgttacattagtgaaatctttaacaaacagcaagggttcgtcaaagacataaaactcattgtttacaatcgaaatagaccccctatcacacttaaaataaaaaatatccttatcctttaccaccaaataaaattctgattggtcaatgtgaatgtattcacttaacagttccacaaatttatttattaactccgaggcacatacatcgtcggtattttttatggcaaactttactcttccagcatccgtttctaaaaaaatattaacgagttccatttatatcatccaatattattgaaatgacgttgatggacagatgatacaaataagaaggtacggtacctttgtccaccatctcctccaattcatgctctattttgtcattaactttaatgtatgaaaacagtacgccacatgcttccatgacagtgtgtaacactttggatacaaaatgtttgacattagtataattgtttaagactgtcaatctataatagatagtagctataatatattctatgatggtattgaagaagatgacaatcttggcatattgatcatttaacacagacatggtatcaacagatagcttgaatgaaagagaatcagtaattggaataagcgtcttctcgatggagtgtccgtataccaacatgtctgatattttgatgtattccattaaattatttagttttttctttttattctcgttaaacagcatttctgtcaacggaccccaacatcgttgaccgattaagttttgattgatttttccgtgtaaggcgtatctagtcagatcgtatagcctatccaataatccatcatctgtgcgtagatcacatcgtacactttttaattctctatagaagagcgacagacatctggaacaattacagacagcaatttctttattctctacagatgtaagatacttgaagacattcctatgatgatgcagaattttggataacacggtattgatggtatctgttaccataattcctttgatggctgatagtgtcagagcacaagatttccaatctttgacaatttttagcaccattatctttgttttgatatctatatcagacagcatggtgcgtctgacaacacagggattaagacggaaagatgaaatgattctctcaacatcttcaatggataccttgctattttttctggcattatctatatgtgcgagaatatcctctagagaatcagtatcctttttgatgatagtggatctcaatgacatgggacgtctaaaccttcttattctatcaccagattgcatggtgatttgtcttctttcttttatcataatgtaatctctaaattcatcggcaaattgtctatatctaaaatcataatatgagatgtttacctctacaaatatctgttcgtccaatgttagagtatctacatcagttttgtattccaaattaaacatggcaacggatttaattttatattcctctattaagtcctcgtcgataataacagaatgtagataatcatttaatccatcgtacatggttggaagatgcttgttgacaaaatctttaattgtcttgatgaaggtgggactatatctaacatcttgattaataaaatttataacattgtccataggatactttgtaactagttttatacacatctcttcatcggtaagtttagacagaatatcgtgaacaggtggtatattatattcatcagatatacgaagaacaatgtccaaatctatattgtttaatatattatatagatgtagtgtagctcctacaggaatatctttaactaagtcaatgatttcatcaaccgttagatctattttaaagttaatcatataggcattgatttttaaaaggtatgtagccttgactacattctcattaattaaccattccaagtcactgtgtgtaagaagattatattctatcataagcttgactacatttggtcccgataccattaaagaattcttatgatataaggaaacagcttttaggtactcatctactctacaagaattttggagagccttaacgatatcagtgacgtttattatttcaggaggaaaaaacctaacattgagaatgtcggagttaatagcttccagatacagtgattttggcaatagtccgtgtaatccataatccagtaacacgagctggtgcttgctagacaccttttcaatgtttaatttttttgaaataagctttgataaagccttcctcgcaaattccggatacatgaacatgtcggcgacatgattaagtattgttttttcattatttttatattttctcaacaagttctcaataccccaatagatgatagaatatcacccaatgcgtccatgttgtctatttccaacaggtcgctatatccaccaatagaagttttcccaaaaaagattctaggaacagttctaccaccagtaatttgttcaaaataatcccgcaattcattttcgggtttaaattctttaatatcgacaatttcatacgctcctcttttgaaactaaacttatttagaatatccagtgcatttctacaaaaaggacatgtatacttgacaaaaattgtcactttgttattggccaacctttgttgtacaaattcctcggccattttaatatttaagtgatataaaactatctcgacttatttaactctttagtcgagatatatggacgcagatagctatatgatagccaactacagaaggcaaacgctataaaaaacataattacgacgagcatatttataaatatttttattcagcattacttgatatagtaatattaggcacagtcaaacattcaaccactctcgatacattaactctctcattttctttaacaaattctgcaatatcttcgtaaaaagattcttgaaactttttagaatatctatcgactctagatgaaatagcgttcgtcaacatactatgttttgtatacataaaggcgcccattttaacagtttctagtgacaaaatgctagcgatcctaggatcctttagaatcacatagattgacgattcgtctctcttagtaactctagtaaaataatcatacaatctagtacgcgaaataatattatccttgacttgaggagatctaaacaatctagttttgagaacatcgataagttcatcgggaatgacatacatactatctttaatagaactcttttcatccagttgaatggattcgtccttaaccaactgattaatgagatcttctattttatcattttccagatgatatgtatgtccattaaagttaaattgtgtagcgcttctttttagtctagcagccaatactttaacatcactaatatcgatatacaaaggagatgatttatctatggtattaagaattcgtttttcgacatccgtcaaaaccaattcctttttgcctgtatcatccagttttccatcctttgtaaagaaattattttctactagactattaataagactgataaggattcctccataattgcacaatccaaactttttcacaaaactagactttacgagatctacaggaatgcgtacttcaggtttcttagcttgtgattttttcttttgcggacattttcttgtgaccaactcatctaccatttcattgattttagcagtgaaataagctttcaatgcacgggcactgatactattgaaaacgagttgatcttcaaattccgccatttaagttcaccaaacaacttttaaatacaaatatatcaatagtagtagaataagaactataaaaaaaataataattaaccaataccaaccccaacaaccggtattattagttgatgtgactgttttctcatcacttagaacagatttaacaatttctataaagtctgtcaaatcatcttccggagaccccataaatacaccaaatatagcggcgtacaacttatccatttatacattgaatattggcttttctttatcgctatcttcatcatattcatcatcaatatcaacaagtcccagattacgagccagatcttcttctacattttcagtcattgatacacgttcactatctccagagagtccgataacgttagccaccacttctctatcaatgattagtttcttgagtgcgaatgtaatttttgtttccgttccggatctatagaagacgataggtgtgataattgccttggccaattgtctttctcttttactgagtgattctagttcaccttctatagatctgagaatggatgattctccagccgaaacatattctaccatggctccgtttaatttgttgatgaagatggattcatccttaaatgttttctctgtaatagtttccaccgaaagactatgcaaagaatttggaatgcgttccttgtgcttaatgtttccatagacggcttctagaagttgatacaacataggactagccgcggtaacttttatttttagaaagtatccatcgcttctatcttgtttagatttatttttataaagtttagtctctccttccaacataataaaagtggaagtcatttgactagataaactatcagtaagttttatagagatagacgaacaattagcgtattgagaagcatttagtgtaacgtattcgatacattttgcattagatttactaatcgattttgcatactctataacacccgcacaagtctgtagagaatcgctagatgcagtaggtcttggtgaagtttcaactctcttcttgattaccttactcatgattaaacctaaataattgtactttgtaatataatgatatatattttcactttatctcatttgagaataaaaatgtttttgtttaaccactgcatgatgtacagatttcggaatcgcaaaccaccagtggttttattttatccttgtccaatgtgaattgaatgggagcggatgcgggtttcgtacgtagatagtacattcccgtttttagaccgagactccatccgtaaaaatgcatactcgttagtttggaataactcggatctgctatatggatattcatagattgactttgatcgatgaaggctcccctgtctgcagccatttttatgatcgtcttttgtggaatttcccaaatagttttataaactcgcttaatatcttctggaaggtttgtattctgaatggatccaccatctgccataatcctattcttgatctcatcattccataattttctctcggttaaaactctaaggagatgcggattaactacttgaaattctccagacaatactctccgagtgtaaatattactggtatacggttccaccgactcattatttcccaaaatttgagcagttgatgcagtcggcataggtgccaccaataaactatttctaagaccgtatgttctgattttatcttttagaggttcccaattccaaagatccgacggtacaacattccaaagatcatattgtagaataccgttactggcgtacgatcctacatatgtatcgtatggtccttccttctcagctagttcacaactcgcctctaatgcaccgtaataaatggtttcgaagatcttcttatttagatcttgtgcttccaggctatcaaatggataatttaagagaataaacgcgtccgctaatccttgaacaccaataccgataggtctatgtctcttattagagatttcagcttctggaataggataataattaatatctataattttattgagatttctgacaattactttgaccacatccttcagtttgagaaaatcaaatcgcccatctattacaaacatgttcaaggcaacagatgccagattacaaacggctacctcattagcatccgcatattgtattatctcagtgcaaagattactacacttgatagttcctaaattttgttgattactctttttgttacacgcatccttataaagaatgaatggagtaccagtttcaatctgagattctataatcgctttccagacgactcgagcctttattatagatttgtatctcctttctctttcgtatagtgtatacaatcgttcgaactcgtctccccaaacattgtccaatccaggacattcatccggacacatcaacgaccactctccgtcatccttcactcgtttcataaagagatcaggaatccaaagagctataaatagatctctggttctatgttcctcgtttcctgtattctttttaagatcgaggaacgccataatatcagaatgccacggttccaagtatatggccataactccaggccgtttgtttcctccctgatctatgtatctagcggtgttattataaactctcaacattggaataataccgtttgatataccattggtaccggagatatagcttccactggcacgaatattactaattgatagacctattccccctgccattttagagattaatgcgcatcgttttaacgtgtcatagataccctctatgctatcatcgatcatgttaagtaaaaaacagctagacatttggtgacgactagttcccgcattaaataaggtaggagaagcgtgcgtaaaccatttttcagaaagtagattgtacgtctcaatagctgagtctatatcccattgatgaattcctactgcgacacgcattaacatgtgctgaggtctttcaacgatcttgttgtttattttcaacaagtaggatttttccaaagttttaaaaccaaaatagttgtatgaaaagtctcgttcgtaaataataaccgagttgagtttatccttatatttgttaactatatccatggtgatacttgaaataatcggagaatgtttcccatttttaggattaacatagttgaataaatcctccatcacttcactaaatagtttttttgtttccttgtgtagatttgatacggctattctggcggctagaatggcataatccggatgttgtgtagtacaagtggctgctatttcggctgccagagtgtccaattctaccgttgttactccattatatattccttgaataaccttcatagctattttaataggatctatatgatccgtgtttaagccataacataattttctaatacgagacgtgattttatcaaacatgacattttccttgtatccatttcgtttaatgacaaacatttttgttggtgtaataaaaaaattatttaacttttcattaatagggatttgacgtatgtagcgtacaaaattatcgttcctggtatatagataaagagtcctatatatttgaaaatcgttacggctcgattaaactttaatgattgcatagtgaatatatcattaggatttaactccttgactatcatggcggcgccagaaattaccatcaaaagcattaatacagttatgccgatcgcagttagaacggttatagcatccaccatttatatctaaaaattagatcaaagaatatgtgacaaagtcctagttgtatactgagaattgacgaaacaatgtttcttacatatttttttcttattagtaactgacttaatagtaggaactggaaagctagacttgattattctataagtatagatacccttccagataatgttctctttgataaaagttccagaaaatgtagaattttttaaaaagttatcttttgctattaccaagattgtgtttagacgcttattattaatatgagtaatgaaatccacaccgcctctagatatcgcctttatttccacattagatggtaaatccaatagtgaaactatctttttaggaatgtatggactcgcgtttagaggagtgaacgtcttgggcgtcggaaaggatgattcgtcaaacgaataaacaatttcacaaatggatgttaatgtattagtaggaaatttcttgacgctagtggagttgaagattctaatggatgatgttctacctatttcatccgataacatgttaatttccgacaccaacggttttaatatttcgatgatatacggtagtctctctttcggacttatatagcttattccacaatacgagtcattatatactccaaaaaacaaaataactagtataaaatctgtatcgaatgggaaaaacgaaattatcgacataggtatagaatccggaacattgaacgtattaatacttaattctttttctgtggtaagtaccgataggttattgacattgtatggttttaaatattctataacttgagacttgatagatattagtgatgaattgaaaattatttttatcaccacgtgtgtttcaggatcatcgtcgacgcccgtcaaccaaccgaatggagtaaaataaatatcattaatatatgctctagatattagtatttttatcaatcctttgattatcatcttctcgtaggcgaatgattccatgatcaagagtgatttaagaacatcctccggagtattaatgggcttagtaaacagtccatcgttgcaataataaaagttatccaagttaaaggatattatgcattcgtttaaagatatcacctcatctgacggagacaattttttggtaggttttagagactttgaagctacttgtttaacaaagttattcatcgtcgtctactattctatttaattttgtagttaatttatcacatatcacattaattgactttttggtccatttttccatacgtttatattcttttaatcctgcgttatccgtttccgttatatccagtgatagatcgtgcaggttaaatagaatgctcttaaataatgtcatttttttatccgctaaaaatttaaagaatgtataaacctttttcagagatttgaaactcttaggtggtgtcctagtacacaatatcataaacaaactaataaacattccacattcagattccaacagctgattaacttccacattaatacagcctattttcgctccaaatgtacattcgaaaaatctgaataaaacatcgatgtcacaatttgtattatccaatacagaatgtctgtgattcgtgttaaaaccatcggagaaggaatagaaataaaaattattatagtggtggaattcagttggaatattgcctccggagtcataaaaggatactaaacattgttttttatcataaattacacatttccaatgagacaaataacaaaatccaaacattacaaatctagaggtagaacttttaattttgtctttaagtatatacgataagatatgtttattcataaacgcgtcaaatttttcatgaatcgctaaggagtttaagaatctcatgtcaaattgtcctatataatccacttcggatccataagcaaactgagagactaagttcttaatacttcgattgctcatccaggctcctctctcaggctctattttcatcttgacgacctttggattttcaccagtatgtattcctttacgtgataaatcatcgattttcaaatccatttgtgagaagtctatcgccttagatactttttcccgtagtcgaggtttaaaaaaatacgctaacggtatactagtaggtaactcaaagacatcatatatagaatggtaacgcgtctttaactcgtcggttaactctttcttttgatcgagttcgtcgctactattgggtctgctcaggtgccccgactctactagttccaacatcataccgataggaatacaagacactttgccggcggttgtagatttatcatatttctccactacatatccgttacaatttgttaaaaatttagatacatctatattgctacataatccagctagtgaatatatatgacataataaattggtaaatcctagttctggtattttactaattactaaatctgtatatctttccatttatcatggaaaagaatttaccagatatcttcttttttccaaactgcgttaatgtattctcttacaaatattcacaagatgaattcagtaatatgagtaaaacggaacgtgatagtttctcattggccgtgtttccagttataaaacatagatggcataacgcacacgttgtaaaacataaaggaatatacaaagttagtacagaagcacgtggaaaaaaagtatctcctccatcactaggaaaacccgcacacataaacctaaccacgaaacaatatatatacagtgaacacacaataagctttgaatgttatagttttctaaaatgtataacaaatacagaaatcaattcgttcgatgagtatatattaagaggactattagaagctggtaatagtttacagatattttccaattccgtaggtaaacgaacagatactataggtgtactagggaataagtatccatttagcaaaattccattggcctcattaactcctaaagcacaacgagagatattttcagcgtggatttctcatagacctgtagttttaactggaggaactggagtgggtaagacgtcacaggtacccaagttattgctttggtttaattatttatttggtggattctctactctagataaaatcactgactttcacgaaagaccagtcattctatctcttcctaggatagctttagttagattgcatagcaataccattttaaaatcattgggatttaaggtactagatggatctcctatttctttacggtacggatctataccggaagaattaataaacaaacaaccaaaaaaatatggaattgtattttctacccataagttatctctaacaaaactatttagttatggcactcttattatagacgaagttcatgagcatgatcaaataggagatattattatagcagtagcgagaaagcatcatacgaaaatagattctatgtttttaatgactgccacgttagaggatgacagggaacggctaaaagtatttttacctaatcccgcatttatacatattcctggagatacactgtttaaaattagcgaggtatttattcataataagataaatccatcttccagaatggcatacatagaagaagaaaagagaaatttagttactgctatacagatgtatactcctcctgatggatcatccggtatagtctttgtggcatccgttgcacagtgtcacgaatataaatcatatttagaaaaaagattaccgtatgatatgtatattattcatggtaaggtcttagatatagacgaaatattagaaaaagtgtattcatcacctaatgtatcgataattatttctactccttatttggaatccagcgttactatacgcaatgttacacacatttatgatatgggtagagtttttgtccccgctccttttggaggatcgcaagaatttatttctaaatctatgagagatcaacgaaaaggaagagtaggaagagttaatcctgggacatacgtatatttctatgatctgtcttatatgaagtctatacagcgaatagattcagaatttctacataattatatattgtacgctaataagtttaatctaacactccccgaagatttgtttataatccctacaaatttggatattctatggcgtacaaaggaatatatagactcgttcgatattagtacagaaacatggaataaattattatccaattattatatgaagatgatagagtatgctaaactttatgtactaagtcctattctcgctgaggagttggataactttgagaggacgggagaattaactagtattgtacgagaagccattttatctctaaatttacgaattaagattttaaattttaaacataaagatgatgatacgtatatacacttttgtaaaatattattcggtgtctataacggaacaaacgctactatatattatcatagacctctaacgggatatatgaatatgatttcagatactatatttgttcctgtagataataactaaaaatcaaactctaatgaccacatctttttttagagatgaaaaattttccacatctccttttgtagacacgactaaacattttgcagaaaaaagtttattagtgtttagataatcgtatacttcatcagtgtagatagtaaatgtgaacagataaaaggtattcttgctcaatagattggtaaattccatagaatatattaatcctttcttcttgagatcccacatcatttcaaccagagacgttttatccaatgatttacctcgtactataccacatacaaaactagattttgcagtgacgtcgtacctggtattcctaccaaacaaaattttacttttagttcttttagaaaattctaaggtagaatctctatttgccaatatgtcatctatggaattaccactagcaaaaaatgatagaaatatatattgatacatcgcagctggttttgatctactatactttaaaaacgaatcagattccataattgcctgtatatcatcagctgaaaaactatgttttacacgtattccttcggcatttctttttaatgatatatcttgtttagacaatgataaagttatcatgtccatgagagacgcgtctccgtatcgtataaatatttcattagatgttagacgcttcattaggggtatacttctataaggtttcttaatcagtccatcattggttgcgtcaagaactactatcggatgttgttgggtatctctagtgttacacatggccttactaaagtttgggtaaataactatgatatctctattaattatagatgcatatatttcattcgtcaaggatattagtatcgacttgctatcgtcattaatacgtgtaatgtaatcatataaatcatgcgatagccaaggaaaattcaaatagatgttcatcatataatcgtcgctataattcatattaatactttgacattgactaatttgtaatatagcctcgccacgaagaaagctctcgtattcagtttcatcgataaaggataccgttaaatataactggttgccgatagtctcatagtctattaagtggtaagtttcgtacaaatacagaatccctaaaatattatctaatgttggattaatctttaccataactgtataaaatggagacggagtcataactattttaccgtttgtacttactggaatagatgaaggaataatctccggacatgctggtaaagacccaaatgtctgtttgaagaaatccaatgttccaggtcctaatctcttaacaaaaattacgatattcgatcccgatatcctttgcattctatttaccagcatatcacgaactatattaagattatctatcatgtctattctcccaccgttatataaatcgcctccgctaagaaacgttagtatatccatacaatggaatacttcatttctaaaatagtattcgttttctaattctttaatgtgaaatcgtatactagaaagggaaaaattatctttgagttttccgttagaaaagaaccacgaaactaatgttctgattgcgtccgattccgttgctgaattaatggatttacaccaaaaactcatataacttctagatgtagaagcattcgctaaaaaattagtagaatcaaaggatataagtagatgttccaacaagtgagcaattcccaagatttcatctatatcattctcgaatccgaaattagaaattcccaagtagatatcctttttcatccgatcattgatgaaaatacgaactttattcggtaagacaatcatttactaaggagtaaaataggaagtaatgttcgtatgtcgttatcatcgtataaattaaaggtgtgttttttaccattaagtgacattataattttaccaatattggaattataatataggtgtatttgcgcactcgcgacggttgatgcatcggtaaatatagctgtatctaatgttctagtcggtatttcatcatttcgctgtctaataatagcgttttctctatctgtttccattacagctgcctgaagtttattggtcggataatatgtaaaataataagaaatacatacgaataacaaaaataaaataagatataataaagatgccatttagagatctaattttgttcaacttgtccaaattcctacttacagaagatgaggaatcgttggagatagtgtcttccttatgtagaggatttgaaatatcttatgatgacttgataacttactttccagataggaaataccataaatatatttctaaagtatttgaacatgtagatttatcggaggaattaagtatggaattccatgatacaactttgcgagatttagtttatcttagattgtacaagtattccaagtgtatacggccgtgttataaattaggagataatctaaaaggcatagttgttataaaggacaggaatatttatattagggaagcaaatgatgacttgatagaatatctcctcaaggaatacactcctcagatttatacatattctaatgagcgcgtccccataactggttcaaaattaattctttgtggattttctcaagttacatttatggcgtatacaacgtcgcatataacaacaaataaaaaggtagatgttctcgtttccaaaaaatgtatagatgaactagtcgatccaataaattatcaaatacttcaaaatttatttgataaaggaagcggaacaataaacaaaatactcaggaagatattttattcggtaacaggtggccaaactccataggtagctttttctatttcggattttagaatttccaaattcaccagcgatttatcggttttggtgaaatccaaggatttattaatgtccacaaatgccatttgttttgtctgtggattgtatttgaaaatggaaacgatgtagttagatagatgcgctgcgaagtttcctattagggttccgcgcttcacgtcacccagcatacttgaatcaccatcctttaaaaaaaatgataagatatcaacatggagtatatcatactcggattttaattcttctactgcatcactgacattttcacaaatactacaatacggtttaccgaaaataatcagtacgttcttcatttatgggtatcaaaaacttaaaatcgttactgctggaaaataaatcactgacgatattagatgataatttatacaaagtatacaatggaatatttgtggatacaatgagtatttatatagccgtcgccaattgtgtcagaaacttagaagagttaactacggtattcataaaatacgtaaacggatgggtaaaaaagggagggcatgtaaccctttttatcgatagaggaagtataaaaattaaacaagacgttagagacaagagacgtaaatattctaaattaaccaaggacagaaaaatgctagaattagaaaagtgtacatccgaaatacaaaatgttaccggatttatggaagaagaaataaaggcagaaatgcaattaaaaatcgataaactcacatttcaaatatatttatctgattctgataacataaaaatatcattgaatgagatactaacacatttcaacaataatgagaatgttacattattttattgtgatgaacgagacgcagaattcgttatgtgtctcgaggctaaaacacatttctctaccacaggagaatggccgttgataataagtaccgatcaggatactatgctatttgcatctactgataatcatcctaagatgataaaaaacttaactcaactgtttaaatttgttccctcggcagaggataactatttagcaaaattaacggcgttagtgaatggatgtgatttctttcctggactctatggggcatctataacacccaacaacttaaacaaaatacaattgtttagtgattttacaatcgataatatagtcactagtttggcaattaaaaattattatagaaagactaactctaccgtagacgtgcgtaatattgttacgtttataaacgattacgctaatttagacgatgtctactcgtatgttcctccttgtcaatgcactgttcaagaatttatattttccgcattagatgaaaaatggaacaattttaaatcatcttatttagagaccgttccgttaccctgtcaattaatgtacgcgttagaaccacgcaaggagattgatgtttcagaagttaaaactttatcatcttatatagatttcgaaaatactaaatcagatatcgatgttataaaatctatatcctcgatcttcggatattctaacgaaaactgtaacacgatagtattcggcatctataaggataatttactactgagtataaataattcattttactttaacgatagtctgttaataaccaatactaaaagtgataatataataaatataggttactagattaaaaatggtgttccaactcgtgtgctctacatgcggtaaagatatttctcacgaacgatataaattgattatacgaaaaaaatcattaaaggatgtactcgtcagtgtaaagaacgaatgttgtaggttaaaattatctacacaaatagaacctcaacgtaacttaacagtgcaacctctattggatataaactaatatggatccggttaattttatcaagacatatgcgcctagaggttctattatttttattaattataccatgtcattaacaagtcatttgaatccatcgatagaaaaacatgtgggtatttattatggtacgttattatcggaacacttggtagttgaatctacctatagaaaaggagttcgaatagtcccattggatagtttttttgaaggatatcttagtgcaaaagtatacatgttagagaatattcaagttatgaaaatagcagctgatacgtcattaactttattgggtattccgtatggatttggtcataatagaatgtattgttttaaattggtagctgactgttataaaaatgccggtgttgaaacatcgtctaaacgaatattaggtaaagatatttttctgagccaaaacttcacagacgataatagatggataaagatatatgattctaataatttaacattttggcaaattgattaccttaaagggtgagttaatatgcataactactcctccgttgttttttcccacgttctttttcttaacgttgtttgccatcactctcataatgtaaagatattctaaaatggtaaacttttgcatatcggacgcagaaattggtataaatgttgtaattgtattatttcccgtcaatggactagtcacagctccatcagttttatatcctttagagtatttctcactcgtgtctagcattctagagcattccatgatctgtttatcgttgatattggccggaaagatagattttttattttttattatattactattggcaattgtagatataacttctggtaaatatttttctaccttttcaatttcttctattttcaagccggctatatattctgctatattgttgctagtatcaataccttttctggctaagaagtcatatgtggtattcactatatcagttttaactggtagttccattagcctttccacttctgcagaataatcagaaattggttctttaccagaaaatccagctactataataggctcaccgatgatcattggcaaaatcctatattgtaccagattaatgagagcatatttcatttccaataattctgctagttcttgagacattgatttatttgatgaatctagttggttctctagatactctaccatttctgccgcatacaataacttgttagataaaatcagggttatcaaagtgtttagcgtggctagaatagtgggcttgcatgtattaaagaatgcggtagtatgagtaaaccgttttaacgaattatatagtctccagaaatctgtggcgttacatacatgagccgaatgacatcgaagattgtccaatatttttaatagctgctctttgtccattatttctatatttgactcgcaacaattgtagataccattaatcactgattcctttttcgatgccggacaatagcacaattgtttagctttggactctatgtattcagaattaatagatatatctcttaatacagattgcactatacattttgaaactatgtcaaaaattgtagaacgacgctgttctgcagccatttaactttaaataatttacaaaaatttaaaatgagcatccgtataaaaatcgataaactgcgccaaattgtggcatatttttcagagttcagtgaagaagtgtctataaatgtagactcgacggatgagttaatgtatatttttgccgccttgggcggatctgtaaacatttgggccattatacctctcagtgcatcagtgttctaccgaggagccgaaaacattgtgtttaatcttcctgtgtccaaggtaaaatcgtgtttgtgtagttttcacaatgatgccatcatagatatagaacctgatctggaaaataatctagtaaaactttctagttatcatgtagtaagtgtcgattgtaataaggaactgatgcctattaggacagatactactatttgtctaagtatagatcaaaagaaatcttatgtgtttaattttcacaagtatgaagaaaaatgttgtggtagaaccgtcattcatttagaatggttgttgggctttatcaagtgtattagtcagcatcagcatctggctattatgtttaaagatgacaatattattatgaagactcctggtaatactgatgcattttccagggaatattctatgactgaatgttctcaagaactacaaaagttttctttcaaaatagctatctcgtctctcaacaaactacgaggattcaaaaagagagtcaatgtttttgaaactagaatcgtaatggataatgacgataacattctaggaatgttgttttcggatagagttcaatcctttaagatcaacatctttatggcgtttttagattaatactttcaatgagataaatatgggtggcggagtaagtgttgagctccctaaacgggatccgcctccgggagtacccactgatgagatgttattaaacgtggataaaatgcatgacgtgatagctcccgctaagcttttagaatatgtgcatataggaccactagcaaaagataaagaggataaagtaaagaaaagatatccagagtttagattagtcaacacaggacccggtggtctttcggcattgttaagacaatcgtataatggaaccgcacccaattgctgtcgcacttttaatcgtactcattattggaaaaaggatggaaagatatcagataagtatgaagagggtgcagtattagaatcgtgttggccagacgttcacgacactggaaaatgcgatgttgatttattcgactggtgtcagggggatacgttcgatagaaacatatgccatcagtggatcggttcagcctttaataggagtaatagaactgtagagggtcaacaatcgttaataaatctgtataataagatgcaaacattatgtagtaaagatgctagtgtaccaatatgtgaatcatttttgcatcatttacgcgcacacaatacagaagatagcaaagagatgatcgattatattctaagacaacagtctgcggactttaaacagaaatatatgagatgtagttatcccactagagataagttagaagagtcattaaaatatgcggaacctcgagaatgttgggatccagagtgttcgaatgccaatgttaatttcttgctaacacgtaattataataatttaggactttgcaatattgtacgatgtaatactagcgtgaacaacttacagatggataaaacttcctcattaagattgtcatgtggattaagcaatagtgatagattttctactgttcccgtcaatagagcaaaagtagttcaacataatattaaacactcgttcgacctaaaattgcatttgatcagtttattatctctcttggtaatatggatactaattgtagctatttaaatgggtgccgcagcaagcatacagacgacggtgaatacactcagcgaacgtatctcgtctaaattagaacaagaagcgaatgctagtgctcaaacaaaatgtgatatagaaatcggaaatttttatatccgacaaaaccatggatgtaacctcactgttaaaaatatgtgctctgcggacgcggatgctcagttggatgctgtgttatcagccgctacagaaacatatagtggattaacaccggaacaaaaagcatacgtgccagctatgtttactgctgcgttaaacattcagacgagtgtaaacactgttgttagagattttgaaaattatgtaaaacaaacttgtaattctagcgcggtcgtcgataacaaattaaagatacaaaacgtaatcatagatgaatgttacggagccccaggatctccaacaaatttggaatttattaatacaggatctagcaaaggaaattgtgccattaaggcgttgatgcaattgactactaaggccactactcaaatagcacctagacaagttgctggtacaggagttcagttttatatgattgttatcggtgttataatattggcagcgttgtttatgtactatgccaagcgtatgctgttcacatccaccaatgataaaatcaaacttattttagccaataaggaaaacgtccattggactacttacatggacacattctttagaacttctccgatggttattgctaccacggatatgcaaaactgaaaatatattgataatattttaatagattaacatggaagttatcgctgatcgtctagacgatatagtgaaacaaaatatagcggatgaaaaatttgtagattttgttatacacggtctagagcatcaatgtcctgctatacttcgaccattaattaggttgtttattgatatactattatttgttatagtaatttatatttttacggtacgtctagtaagtagaaattatcaaatgttgttggcgttggtggcgctagtcatcacattaactattttttattactttatactataatagtactagactgacttctaacaaacatctcacctgccataaataaatgcttgatattaaagtcttctatttctaacactattccatctgtggaaaataatactctgacattatcgctaattgacacatcggtgagtgatatgcctataaagtaataatcttctttgggcacatataccagtgtaccaggttctaacaacctatttactggtgctcctgtagcatactttttctttaccttgagaatatccatcgtttgcttggtcaatagcgatatgtgattttttatcaaccactcgaaaaagtaattggagtgttcatatcctctacgggctattgtctcatggccgtgtatgaaatttaagtaacacgactgtggtagatttgttctatagagccggttgccgcaaatagatagaactaccaatatgtctgtacaaatgttaaacattaattgattaacagaaaaaacaatgttcgttctgggaatagaaaccagatcaaaacaaaattcgttagaatatatgccacgtttatacattgaatataaaataactacagtttgaaaaataacagtatcatttaaacatttaacttgcggggttaatttcacaactttactgtttttaagctgttcaaaatatagcatcgatccatgagaaatacgtttagccgcctttaatagaggaaatcccaccgcctttctggatctcaccaacgacgatagttctgaccagcaactcatttcttcatcatccacctgttttaacatataataggcaggagatagatatccgtcattgcaatattccttttcgtaggcacacaatctaatattgataaaatctccattctcttctctgcatttattatcttgtttcggtggctgattaggctgtagtcttggtttaggccttggtctatcgttgttgaatctattttggtcattaaatctttcatttcttcctggtatatttctatcacctcgtttggttggatttttgtctatattatcgtttgtaacatcggtacgggtattcatttatcacaaaaaaaacttctctaaatgagtctactgctagaaaacctcatcgaagaagataccatattttttgcaggaagtatatctgagtatgatgatttacaaatggttattgccggcgcaaaatccaaatttccaagatctatgctttctatttttaatatagtacctagaacgatgtcaaaatatgagttggagttgattcataacgaaaatatcacaggagcaatgtttaccacaatgtataatataagaaacaatttgggtctaggagatgataaactaactattgaagccattgaaaactatttcttggatcctaacaatgaagttatgcctcttattattaataatacggatatgactgccgtcattcctaaaaaaagtggtaggagaaagaataagaacatggttatcttccgtcaaggatcatcacctatcttgtgcattttcgaaactcgtaaaaagattaatatttataaagaaaatatggaatccgcatcgactgagtatacacctatcggagacaacaaggctttgatatctaaatatgcgggaattaatgtcctgaatgtgtattctccttccacatccatgagattgaatgccatttacggattcaccaataaaaataaactagagaaacttagtactaataaggaactagaatcgtatagttctagccctcttcaagaacccattaggttaaatgattttctgggactattggaatgtgttaaaaagaatattcctctaacagatattccgacaaaggattgattactataaatggagaatgttcctaatgtatactttaatcctgtgtttatagagcccacgtttaaacattctttattaagtgtttataaacacagattaatagttttatttgaagtattcgttgtattcattctaatatatgtattttttagatctgaattaaatatgttcttcatgcctaaacgaaaaatacccgatcctattgatagattacgacgtgctaatctagcgtgtgaagacgataaattaatgatctatggattaccatggatgacaactcaaacatctgcgttatcaataaatagtaaaccgatagtgtataaagattgtgcaaagcttttgcgatcaataaatggatcacaaccagtatctcttaacgatgttcttcgcagatgatgattcattttttaagtatttggctagtcaagatgatgaatcttcattatctgatatattgcaaatcactcaatatctagactttctgttattattattgatccaatcaaaaaataaattagaagccgtgggtcattgttatgaatctctttcagaggaatacagacaattgacaaaattcacagactctcaagattttaaaaaactgtttaacaaggtccctattgttacagatggaagggtcaaacttaataaaggatatttgttcgactttgtgattagtttgatgcgattcaaaaaagaatcctctctagctaccaccgcaatagatcctattagatacatagatcctcgtcgcgatatcgcattttctaacgtgatggatatattaaagtcgaataaagtgaacaataattaattctttattgtcatcatgaacggcggacatattcagttgataatcggccccatgttttcaggtaaaagtacagaattaattagacgagttagacgttatcaaatagctcaatataaatgcgtgactataaaatattctaacgataatagatacggaacgggactatggacgcatgataagaataattttgaagcattggaagcaactaaactatgtgatgtcttggaatcaattacagatttctccgtgataggtatcgatgaaggacagttctttccagacattgttgaattctgtgagcgtatggcaaacgaaggaaaaatagttatagtagccgcactcgatgggacatttcaacgtaaaccgtttaataatattttgaatcttattccattatctgaaatggtggtaaaactaactgctgtgtgtatgaaatgctttaaggaggcttccttttctaaacgattgggtgaggaaaccgagatagaaataataggaggtaatgatatgtatcaatcggtgtgtagaaagtgttacatcgactcataatattatattttttatctaaaaaactaaaaataaacattgattaaattttaatataatacttaaaaatggatgttgtgtcgttagataaaccgtttatgtattttgaggaaattgataatgagttagattacgaaccagaaagtgcaaatgaggtcgcaaaaaaactgccgtatcaaggacagttaaaactattactaggagaattattttttcttagtaagttacagcgacacggtatattagatggtgccaccgtagtgtatataggatcggctcctggtacacatatacgttatttgagagatcatttctataatttaggaatgattatcaaatggatgctaattgacggacgccatcatgatcctattctaaatggattgcgtgatgtgactctagtgactcggttcgttgatgaggaatatctacgatccatcaaaaaacaactgcatccttctaagattattttaatttctgatgtaagatccaaacgaggaggaaatgaacctagtacggcggatttactaagtaattacgctctacaaaatgtcatgattagtattttaaaccccgtggcatctagtcttaaatggagatgcccgtttccagatcaatggatcaaggacttttatatcccacacggtaataaaatgttacaaccttttgctccttcatattcagctgaaatgagattattaagtatttataccggtgagaacatgagactgactcgagttaccaaatcagacgttgtaaattatgaaaaaaagatgtactaccttaataagatcgtccgtaacaaagtagttgttaactttgattatcctaatcaggaatatgactattttcacatgtactttatgctgaggaccgtgtactgcaataaaacatttcctactactaaagcaaaggtactatttctacaacaatctatatttcgtttcttaaatattccaacaacatcaactgaaaaagttagtcatgaaccaatacaacgtaaaatatctagcaaaaattctatgtctaaaaacagaaatagcaagagatccgtacgcggtaataaatagaaacgtactactgagatatactaccgatatagagtataatgatttagttactttaataaccgttagacataaaattgattctatgaaaactgtgtttcaggtatttaacgaatcatccataaattatactccggttgatgatgattatggagaaccaatcattataacatcgtatcttcaaaaaggtcataacaagtttcctgtaaattttctatacatagatgtggtaatatctgacttatttcctagctttgttagactagatactacagaaactaatatagttaatagtgtactacaaacaggcgatggtaaaaagactcttcgtcttcccaaaatgttagagacggaaatagttgtcaagattctctatcgccctaatataccattaaaaattgttagatttttccgcaataacatggtaactggagtagagatagccgatagatctgttatttcagtcgctgattaatcaattagtagagatgagataagaacattataataatcaataatatatcttatatcttatatcttatatcttgtttagaaaaatgctaatattaaaatagctaacgctagtaatccaatcggaagccatttgatatctataatagggtatctaatttcctgatttaaatagcggacagctatattctcggtagctactcgtttggaatcacaaacattatttacatctaatttactatctgtaatggaaacgtttcccaatgaaatggtacaatccgatacattgcattttgttatatttttttttaaagaggctggtaacaacgcatcgcttcgtttacatggctcgtaccaacaataatagggtaatcttgtatctattcctatccgtactatgcttttatcaggataaatacatttacatcgtatatcgtctttgttagcatcacagaatgcataaatttgttcgtccgtcatgataaaaatttaaagtgtaaatataactattatttttatagttgtaataaaaagggaaatttgattgtatactttcggttctttaaaagaaactgacttgataaaaatggctgtaatctctaaggttacgtatagtctatatgatcaaaaagagattaatgctacagatattatcattagtcatgttaaaaatgacgacgatatcggtaccgttaaagatggtagactaggtgctatggatggggcattatgtaagacttgtgggaaaacggaattggaatgtttcggtcactggggtaaagtaagtatttataaaactcatatagttaagcctgaatttatttcagaaattattcgtttactgaatcatatatgtattcactgcggattattgcgttcacgagaaccgtattccgacgatattaacctaaaagagttatcgggacacgctcttaggagattaaaggataaaatattatccaagaaaaagtcatgttggaacagcgaatgtatgcaaccgtatcaaaaaattactttttcaaagaaaaaggtttgtttcgtcaacaagttggatgatattaacgttcctaattctctcatctatcaaaagttaatttctattcatgaaaagttttggccattattagaaattcatcaatatccagctaacttattttatacagactactttcccatccctccgctgattattagaccggctattagtttttggatagatagtatacccaaagagaccaatgaattaacttacttattaggtatgatcgttaagaattgtaacttgaatgctgatgaacaggttatccagaaggcggtaatagaatacgatgatattaaaattatttctaataacacttccagtatcaatttatcatatattacatccggcaaaaataatatgattagaagttatattgtcgcccgacgaaaagatcagaccgctagatctgtaattggtcccagtacatctatcaccgttaatgaggtaggaatgcccgcatatattagaaatacacttacagaaaagatatttgttaatgcctttacagtggataaagttaaacaactattagcgtcaaaccaagttaaattttactttaataaacgattaaaccaattaacaagaatacgccaaggaaagtttattaaaaataaaatacatttattgcctggtgattgggtagaagtagctgttcaagaatatacaagtattatttttggaagacagccgtctctacatagatacaacgtcatcgcttcatctatcagagctaccgaaggagatactatcaaaatatctcccggaattgccaactctcaaaatgctgatttcgacggagatgaagaatggatgatattggagcaaaatcctaaagccgtaattgaacaaagtattcttatgtatccgacgacgttactcaaacacgatattcatggagcccccgtttatggatctattcaagatgaaatcgtagcagcgtattcattgtttagaatacaagatctttgtttagatgaagtattgaacatcttggggaaatatggaagaaagttcgatcctaaaggtaaatgtaaattcagcggtaaagatatctatacttacttgataggtgaaaagattaattatccgggtctcttaaaggatggtgaaattattgcaaacgacgtagatagtaattttgttgtggctatgaggcatctgtcattggctggactcttatccgatcataagtcgaacgtggaaggtatcaactttattatcaagtcatcttatgtttttaagagatatctatctatttacggttttggggtgacattcaaagatctgagaccaaattcgacgttcactaataaattggaggccatcaacgtagaaaaaatagaacttatcaaagaagcatacgccaaatatctcaacgatgtaagagacgggaaaatagttccattatctaaagctttagaggcggactatgtggaatccatgttatccaacttgacaaatcttaatatccgagagatagaagaacatatgagacaaacgctgatagatgatccagataataacctcctgaaaatggccaaagcgggttataaagtaaatcccacagaactaatgtatattctaggtacttatggacaacagaggattgatggtgaaccagcagagactcgagtattgggtagagtcttaccttactatcttccagactctaaggatccagaaggaagaggttatattcttaattctttaacaaaaggattaacaggttctcaatattacttttcgatgctggttgccagatctcaatctactgatatcgtctgtgaaacatcacgtaccggaacactggctagaaaaatcattaaaaagatggaggatatggtggtcgacggatacggacaagtagttataggtaatacgctcatcaagtacgccgccaattataccaaaattctaggctcagtatgtaaacctgtagatcttatctatccagatgagtccatgacttggtatttggaaattagtgctctgtggaataaaataaaacagggattcgtttactctcagaaacagaaacttgcaaaaaagacattggcgccgtttaatttcctagtattcgtcaaacccaccactgaggataatgctattaaggttaaggatctgtacgatatgattcataacgtcattgatgatgtgagagagaaatacttctttacggtatctaatatagattttatggagtatatattcttgacgcatcttaatccttctagaattagaattacaaaagaaacggctatcactatctttgaaaagttctatgaaaaactcaattatactctaggtggtggaactcctattggaattatttctgcacaggtattgtctgagaagtttacacaacaagccctgtccagttttcacactactgaaaaaagtggtgccgtcaaacaaaaacttggtttcaacgagtttaataacctgactaatttgagtaagaataagaccgaaattatcactctggtatccgatgatatctctaaacttcaatctgttaagattaatttcgaatttgtatgtttgggagaattaaatccaaacatcactcttcgaaaagaaacagataggtatgtagtagatataatagtcaatagattatacatcaagagagcagaaattaccgaattagtcgtcgaatatatgattgaacgatttatctcctttagcgtcattgtaaaggaatggggtatggagacattcattgaggacgaggataatattagatttactgtctacctaaatttcgttgaaccggaagaattgaatcttagtaagtttatgatggttcttccgggtgccgccaacaagggcaagattagtaaattcaagattcctatctctgactatacgggatatgacgacttcaatcaaacaaaaaagctcaataagatgactgtagaactcatgaatctaaaagaattgggttctttcgatttggaaaacgtcaacgtgtatcctggagtatggaatacatacgatatcttcggtatcgaggccgctcgtgaatacttgtgcgaagccatgttaaacacctatggagaagggttcgattatctgtatcagccttgtgatcttctcgctagtttactatgtgctagttacgaaccagaatcagtgaataaattcaagttcggcgcagctagtactcttaagagagctacgttcggagacaataaagcattgttaaacgcggctcttcataaaaagtcagaacctattaacgataatagtagctgccacttttttagcaaggtccctaatataggaactggatattacaaatactttatcgacttgggtcttctcatgagaatggaaaggaaactatctgataagatatcttctcaaaagatcaaggaaatggaagaaacagaagacttttaattcttatcaataacatatttttctatgatctgtcttttaaacgatggattttccacaaatgcgcctctcaagtccctcatagaatgatacacgtataaaaaatatagcataggcgatgactccttatttttagacattagatatgccaaaatcatagccccgcttctatttactcccgcagcacaatgaaccaacacgggctcgtttcgttgatcacatttagataaaaaggcggtcacgtcgtcaaaatatttactaatatcggtagttgtatcatctaccaacggtatatgaataatattaatattagagttaggcaatgtatatttatccatcgtcaaatttaaaacatatttgaacttaacttcagatgatggtgcatccatagcatttttataatttcccaaatacacattattggttacccttgtcattatagtgggagatttggctttgtgcatatctccagttgaacgtagtagtaagtatttatacaaacttttcttatccatttataacgtacaaatggataaaactactttatcggtaaacgcgtgtaatttagaatacgttagagaaaaggctatagtaggcgtacaagcagccaaaacatcaacacttatattctttgttattatattggcaattagtgcgctattactctggtttcagacgtctgataatccagtctttaatgaattaacgagatatatgcgaattaaaaatacggttaacgattggaaatcattaacggatagcaaaacaaaattagaaagtgatagaggtaaacttctagccgctggtaaggatgatatattcgaattcaaatgtgtggatttcggcgcctattttatagctatgcgattggataagaaaacatatctgccgcaagctattaggcgaggtactggagacgcgtggatggttaaaaaggcggcaaaggtcgatccatctgctcaacaattttgtcagtatttgataaaacacaagtctaataatgttattacttgtggtaatgagatgttaaatgaattaggttatagcggttattttatgtcaccgcattggtgttccgattttagtaatatggaatagtgttagataaatgcggtaacaaatgttcctgtaaggaaccataacagcttagatttaacgttaaagatgagcataaacataataaacaaaattacaatcaaacctataacattaatatcaaacaatccaaaaaatgaaatcagtggagtagtaaacgcgtacataactcctggataacgtttagcagctgccgttcctattctagaccaaaaattcggtttcatgttttcgaagcggtgttctgcaacaagtcggggatcgtgttctacatatttggcggcattatccagtatctgcctattgatcttcatttcgttttcgattctggctatttcaaaataaaatcccgatgatagacctccagactttataatttcatctacgatgttcagcgccgtagtaactctaataatataggctgataagctaacatcataccctcctgtatatgtgaatatggtatgatttttgtccattacaagctcggttttaactttattgcctgtaataatttctctcatctgtaggatatctatttttttgtcatgcattgccttcaagacgggacgaagaaacgtaatatcctcaataacgttatcgttttctacaataactacatattctacctttttattttctaactcggtaaaaaaattagaatcccatagggctaaatgtctagcgatatttcttttcgtttcctctgtacacatagtgttacaaaaccctgaaaagaagtgagtatacttgtcatcatttctaatgtttcctccagtccactgtataaacgcataatccttgtaatgatctggatcatccttgactaccacaacatttcttttttctggcataacttcgttgtcctttacatcatcgaacttctgatcattaatatgctcatgaacattaggaaatgtttctgatggaggtctatcaataactggcacaacaataacaggagttttcaccgccgccatttagttattgaaattaatcatatacaactctttaatacgagttatattttcgtctatccattgtttcacatttacatatttcgacaaaaagatataaaatgcgtattccaatgcttctctgtttaatgaattactaaaatatacaaacacgtcactgtctggcaataaatgatatcttagaatattgtaacaatttattttgtattgcacatgttcgtgatctatgagttcttcttcgaatggcataggatctccgaatctgaaaacgtataaataggagttagaataataatatttgagagtattggtaatatataaactctttagcggtataattagtttttttctctcaatttctatttttagatgtgatggaaaaatgactaattttgtagcattagtatcatgaactctaatcaaaatcttaatatcttcgtcacacgttagctctttgaagtttttaagagatgcatcagttggttctacagatggagtaggtgcaacaattttttgttctacacatgtatgtactggagccattgttttaactataatggtgcttgtatcgaaaaactttaatgcagatagcggaagctcttcgccgcgactttctacatcgtaattgggttctaacgccgatctctgaatggatactagttttctaagttctaatgtgattctctgaaaatgtaaatccaattcctccggcattatagatgtgtatacatcggtaaataaaactatagtatccaacgatcccttctcgcaaattctagtcttaaccaaaaaatcgtatataaccacggagatggcgtatttaagagtggattcttctaccgttttgttcttggatgtcatataggaaactataaagtccgcactactgttaagaatgattactaacgcaactatatagttcaaattaagcattttggaaacataaaataactctgtagacgatacttgactttcgaataagtttgcagacaaacgaagaaagaacagacctctcttaatttcagaagaaaactttttttcgtattcctgacgtctagagtttatatcaataagaaagttaagaattagtcggttaatgttgtatttcattacccaagtttgagatttcataatattatcaaaagacatgataatattaaagataaagcgctgactatgaacgaaatagctatatggttcgctcaaaaatatagtcttgttaaacgtggaaacgataactgtatttttaatcacgtcagcggcatctaaattaaatataggtatatttattccacacactctacaatatgccacaccatcttcataataaataaattcgttagcaaaattattaattttagtgaaatagttagcgtcaactttcatagcttccttcaatctaatttgatgctcacacggtgcgaattctactctaacatcccttttccatgcctcaggttcatcgatctctataatatctagttttttgcgtttcacaaacacaggctcgtctctcgcgatgagatctgtatagtaactatgtaaatgataactagatagaaagatgtagctatatagatgacgatcctttaagagaggtataataactttaccccaatcagatagactgttgttatggtcttcggaaaaagaatttttataaatttttccagtattttccaaatatacgtacttaacatctaaaaaatccttaatgataataggaatggataatccgtctattttataaagaaatacatatcgcacattatacttttttttggaaatgggaataccgatgtgtctacataaatatgcaaagtctaaatattttttagagaatcttagttggtccaaattcttttccaagtacggtaatagatttttcatattgaacggtatcttcttaatctctggttctagttccgcattaaatgatgaaactaagtcactatttttataactaacgattacatcacctctaacatcatcatttaccagaatactgatcttcttttgtcgtaaatacatgtctaatgtgttaaaaaaaagatcatacaagttatacgtcatttcatctgtggtattcttgtcattgaaggataaactcgtactaatctcttctttaacagcctgttcaaatttatatcctatatacgaaaaaatagcaaccagtgtttgatcatccgcgtcaatattctgttctatcgtagtgtataacaatcgtatatcttcttctgtgatagtcgatacgttataaaggttgataacgaaaatatttttatttcgtgaaataaagtcatcgtaggattttggacttatattcgcgtctagtagatatgcttttatttttggaatgatctcaattagaatagtctctttagagtccatttaaagttacaaacaactaggaaattggtttatgatgtataatttttttagtttttatagattctttattctatacttaaaaaatgaaaataaatacaaaggttcttgagggttgtgttaaattgaaagcgagaaataatcataaattatttcattatcgcgatatccgttaagtttgtatcgtaatggcgtggtcaattacaaataaagcggatactagtagcttcacaaagatggctgaaatcagagctcatctaaaaaatagcgctgaaaataaagataaaaacgaggatattttcccggaagatgtaataattccatctactaagcccaaaaccaaacgagccactactcctcgtaaaccagcggctactaaaagatcaaccaaaaaggaggaagtggaagaagaagtagttatagaggaatatcatcaaacaactgaaaaaaattctccatctcctggagtcggcgacattgtagaaagcgtggctgctgtagagctcgatgatagcgacggggatgatgaacctatggtacaagttgaagctggtaaagtaaatcatagtgctagaagcgatctttctgacctaaaggtggctaccgacaatatcgttaaagatcttaagaaaattattactagaatctctgcagtatcgacggttctagaggatgttcaagcagctggtatctctagacaatttacttctatgactaaagctattacaacactatctgatctagtcaccgagggaaaatctaaagttgttcgtaaaaaagttaaaacttgtaagaagtaaatgcgtgcacttttttataaagatggtaaactctttaccgataataattttttaaatcctgtatcagacgataatccagcgtatgaggttttgcaacatgttaaaattcctactcatttaacagatgtagtagtatatgaacaaacgtgggaagaggcattaactagattaatttttgtgggaagcgattcaaaaggacgtagacaatacttttacggaaaaatgcatgtacagaatcgcaacgctaaaagagatcgtatttttgttagagtatataacgttatgaaacgaattaattgttttataaacaaaaatataaagaaatcgtccacagattccaattatcagttggcggtttttatgttaatggaaactatgttttttattagatttggtaaaatgaaatatcttaaggagaatgaaacagtagggttattaacactaaaaaataaacacatagaaataagtcccgatgaaatagttatcaagtttgtaggaaaggacaaagtttcacatgaatttgttgttcataagtctaatagactatataaaccgctattgaaactgacggatgattctagtcccgaagaatttctgttcaacaaactaagtgaacgaaaggtatacgaatgtatcaaacagtttggtattagaatcaaggatctccgaacgtatggagtcaattatacgtttttatataatttttggacaaatgtaaagtccatatctcctcttccgtcaccaaaaaagttaatagcgttaactatcaaacaaactgctgaagtggtaggtcatactccatcaatttcaaaaagagcttacatggcaacgactattttagaaatggtaaaggataaaaattttttagatgtagtatctaaaactacgttcgatgaattcctatctatagtcgtagatcacgttaaatcatctacggatggatgatatagatctttacacaaataattacaagaccgataaatggaaatggataagcgtataaaatctctcgcaatgacagctttcttcggagagctaaacacattagatattatggcattgataatgtctatatttaaacgccatccaaacaataccattttttcagtggataaggatggtcagtttatgattgatttcgaatacgataattataaggcttctcaatatttggatctgaccctcactccgatatctggagatgaatgcaagactcacgcatcgagtatagccgaacaattggcgtgtgcggatattattaaagaggatattagcgaatatatcaaaactactccccgtcttaaacgatttataaaaaaataccgcaatagatcagatactcgcatcagtcgagatacagaaaagcttaaaatagctctagctaaaggcatagattacgaatatataaaagacgcttgttaataagtaaatgaaaaaaaactagtcgtttataataaaacacgatatggatgccaacgtagtatcatcttctactattgcaacgtatatagacgctttagcgaagaatgcttcagaattagaacagaggtctaccgcatacgaaataaataatgaattggaactagtatttattaagccgccattaattactttgacaaatgtagtgaatatctctacgattcaggaatcgtttattcgatttaccgttactaataaggaaggtgttaaaattagaactaagattccattatctaaggtacatggtctagatgtaaaaaatgtacagttagtagatgctatagataacatagtttgggaaaagaaatcattagtgacggaaaatcgtcttcacaaagaatgcttgttgagactatcgacagaggaacgtcatatatttttggattacaagaaatatggatcctctatccgactagaattagtcaatcttattcaagcaaaaacaaaaaactttacgatagactttaagctaaaatattttctaggatccggtgcccagtctaaaagttctttattacacgctattaatcatccaaagtcaaggcctaatacatctctggaaatagaattcacacctagagacaatgaaaaagttccatatgatgaactaataaaggaattgacgactctatcacgtcatatatttatggcttctccagagaatgtaattctttctccgcctattaacgcacctataaagacttttatgttgcctaaacaagatatagtaggtctggatctggaaaatctatacgctgtaactaagactgacggcattcctataactatcagagttacatcaaacgggttgtattgttattttacacatcttggttatattattagatatcctgttaagagaataatagattccgaagtagtagtctttggtgaggcagttaaggataagaactggaccgtatatctcattaagctaatagagcctgtgaatgcaatcaatgatagactagaagaaagtaagtatgttgaatctaaactagtggatatttgtgatcggatagtattcaagtcaaagaaatacgaaggtccgtttactacaactagtgaagtcgtcgatatgttatctacatatttaccaaagcaaccagaaggtgttattctgttctattcaaagggacctaaatctaacattgattttaaaattaaaaaggaaaatactatagaccaaactgcaaatgtagtatttaggtacatgtccagtgaaccaattatctttggagaatcgtctatctttgtagagtataagaaatttagcaacgataaaggctttcctaaagaatatggttctggtaagattgtgttatataacggcgttaattatctaaataatatctattgtttggaatatattaatacacataatgaagtgggtattaagtccgtggttgtacctattaagtttatagcagaattcttagttaatggagaaatacttaaacctagaatcgataaaaccatgaaatatattaactcagaagattattatggaaatcaacataatatcatagtcgaacatttaagagatcaaagcatcaaaataggagatatctttaacgaggataaactatcggatgtgggacatcaatacgccaataatgataaatttagattaaatccagaagttagttattttacgaataaacgaactagaggaccgttgggaattttatcaaactacgtcaagactcttcttatttctatgtattgttccaaaacatttttagacgattccaacaaacgaaaggtattggcgattgattttggaaacggtgctgacctggaaaaatacttttatggagagattgcgttattggtagcgacggatccggatgctgatgctatagctagaggaaatgaaagatacaacaaattaaactctggaattaaaaccaagtactacaaatttgactacattcaggaaactattcgatccgatacatttgtctctagtgtcagagaagtattctattttggaaagtttaatatcatcgactggcagtttgctatccattattcttttcatccgagacattatgctaccgtcatgaataacttatccgaactaactgcttctggaggcaaggtattaatcactaccatggacggagacaaattatcaaaattaacagataaaaagacttttataattcataagaatttacctagtagcgaaaactatatgtctgtagaaaaaatagctgatgatagaatagtggtatataatccatcaacaatgtctactccaatgactgaatacattatcaaaaagaacgatatagtcagagtgtttaacgaatacggatttgttcttgtagataacgttgatttcgctacaattatagaacgaagtaaaaagtttattaatggcgcatctacaatggaagatagaccgtctacaaaaaactttttcgaactaaatagaggagccattaaatgtgaaggtttagatgtcgaagacttacttagttactatgttgtttatgtcttttctaagcggtaaataataatatggtatgggttctgatatccccgttctaaatgcattaaataattccaatagagcgatttttgttcctataggaccttccaactgtggatactctgtattgttaatagatatattaatacttttgtcgggtaacagaggttctacgtcttctaaaaataaaagtttgataacatctggcctgttcataaataaaaacttggcgattctatatatactcttattatcaaatctagccattgtcttatagatgtgagctactgtaggtgtaccatttgattttctttctaatactatatatttctctcgaagaagttcttgcacatcatctgggaataaaatactactgttgagtaaatcagttattttttttatatcgatattgatggacatttttatagttaaggataataagtatcccaaagtcgataacgacgataacgaagtatttatacttttaggaaatcacaatgactttatcagattaaaattaacaaaattaaaggagcatgtatttttttctgaatatattgtgactccagatacatatggatctttatgcgtcgaattaaatgggtctagttttcagcacggtggtagatatatagaggtggaggaatttatagatgctggaagacaagttagatggtgttctacatccaatcatatatctgaagatatacccgaagatatacacactgataaatttgtcatttatgatatatacacttttgacgctttcaagaataaacgattggtattcgtacaggtacctccgtcgttaggagatgatagtcatttgactaatccgttattgtctccgtattatcgtaattcagtagccagacaaatggtcaatgatatgatttttaatcaagattcatttttaaaatatttattagaacatctgattagaagccactatagagtttctaaacatataacaatagttagatacaaggataccgaagaattaaatctaacgagaatatgttataatagagataagtttaaggcgtttgtattcgcttggtttaacggcgtttcggaaaatgaaaaggtactagatacgtataaaaaggtatctaatttgatataatgaattcagtgactgtatcacacgcgccatatactattacttatcacgatgattgggaaccagttatgagtcaattggtagagttttataacgaagtagccagttggctgctacgagacgagacgtcgcctattcctgataagttctttatacagttgaaacaaccgcttagaaataaacgagtatgtgtgtgtggtatagatccgtatccgaaagatggaactggtgtaccgttcgaatcaccaaattttacaaaaaaatcaattaaggagatagcttcatctatatctagattaaccggagtaattgattataaaggttataaccttaatataatagacggggttataccctggaattattacttaagttgtaaattaggagaaacaaaaagtcacgcgatctactgggataagatttccaagttactgctgcagcatataactaaacacgttagtgttctttattgtttgggtaaaacagatttctcgaatatacgggcaaagttagaatccccggtaactaccatagtgggatatcatccagcggctagagaccgccaattcgagaaagatagatcatttgaaattatcaacgttttactggaattagacaacaaggtacctataaattgggctcaagggtttatttattaatgctttagtgaaattttaacttgtgttctaaatggatgcggctattagaggtaatgatgttatctttgtccttaagactataggtgtcccatcagcatgtagacaaaatgaagatccaagattcgtagaagcatttaaatgcgacgagttaaaaagatatattgataataatccagaatgtacactattcgaaagtcttagggatgaggaagcatactctatagtcagaattttcatggatgtagatttagacgcgtgtctagacgaaatagattatttaacggctattcaagattttattatcgaggtgtcaaactgtgtagctagattcgcgtttacagaatgcggtgccattcatgaaaatgtaataaaatccatgagatctaatttttcattgactaagtctacaaatagagataaaacaagttttcatattatctttttagacacgtataccactatggatacattgatagctatgaaacgaacactattagaattaagtagatcatctgaaaatccactaacaagatcgatagacactgccgtatataggagaaaaacaactcttcgggttgtaggtactaggaaaaatccaaattgcgacactattcatgtaatgcaaccaccgcatgataatatagaagattacctattcacttacgtggatatgaacaacaatagttattacttttctctacaacgacgattggaggatttagttcctgataagttatgggaaccagggtttatttcattcgaagacgctataaaaagagtttcaaaaatattcattaattctataataaactttaatgatctcgatgaaaataattttacaacggtaccactggtcatagattacgtaacaccttgtgcattatgtaaaaaacgatcgcataaacatccgcatcaactatcgttggaaaatggtgctattagaatttacaaaactggtaatccacatagttgtaaagttaaaattgttccgttggatggtaataaactgtttaatattgcacaaagaattttagacactaactctgttttattaaccgaacgaggagactatatagtttggattaataattcatggaaatttaacagcgaagaacccttgataacaaaactaattctgtcaataagacatcaactacctaaggaatattcaagcgaattactctgtccgaggaaacgaaagactgtagaagctaacatacgagacatgttagtagattcagtagagaccgatacctatccggataaacttccgtttaaaaatggtgtattggacctggtagacggaatgttttactctggagatgatgctaaaaaatatacgtgtactgtatcaaccggatttaaatttgacgatacaaagttcgtcgaagacagtccagaaatggaagagttaatgaatatcattaacgatatccaaccattaacggatgaaaataagaaaaatagagagctatatgaaaaaacattatctagttgtttatgtggtgctaccaaaggatgtttaacattcttttttggagaaactgcaactggaaagtcgacaaccaaacgtttgttaaagtctgctatcggtgacctgtttgttgagacgggtcaaacaattttaacagatgtattggataaaggacctaatccatttatcgctaacatgcatttgaaaagatctgtattctgtagcgaactacctgattttgcctgtagtggatcaaagaaaattagatctgataatattaaaaagttgacagaaccttgtgtcattggaagaccgtgtttctccaataaaattaataatagaaaccatgctacaatcattatcgatactaattacaaacctgtctttgataggatagataacgcattaatgagaagaattgccgtcgtgcgattcagaacacacttttctcaaccttctggtagagaggctgctgaaaataatgacgcgtacgataaagtcaaactattagacgaggggttagatggtaaaatacaaaataatagatatagatttgcatttctatacttgttggtgaaatggtacaaaaaatatcatgttcctattatgaaactatatcctacacccgaagagattcctgactttgcattctatctcaaaataggtactctgttagtatctagctctgtaaagcatattccattaatgacggacctctccaaaaagggatatatattgtacgataatgtggttactcttccgttgactactttccaacagaaaatatccaagtattttaattctagactatttggacacgatatagagagcttcatcaatagacataagaaatttgccaatgttagtgatgaatatctgcaatatatattcatagaggatatttcatctccgtaaatatatgctcatatatttatagaagatatcacatatctaaatgaataccggaattatagatttatttgataatcatgttgatagtataccaactatattacctcatcagttagctactctagattatctagttagaactatcatagatgagaacagaagcgtgttattgttccatattatgggatcaggtaaaacaataatcgctttgttgttcgccttggtagcttccagatttaaaaaggtttacattctagtgccgaacatcaacatcttaaaaattttcaattataatatgggtgtagctatgaacttgtttaatgacgaattcatagctgagaatatctttattcattccacaacaagtttttattctcttaattataacgataacgtcattaattataacggattatctcgctacaataactctatttttatcgttgatgaggcacataatatctttgggaataatactggagaacttatgaccgtgataaaaaataaaaacaagattccttttctactattgtctggatctcccattactaacacacctaatactctgggtcatattatagatttaatgtccgaagagacgatagattttggtgaaattattagtcgtggtaagaaagtaattcagacacttcttaacgaacgaggtgtgaatgtacttaaggatttgcttaaaggaagaatatcatattacgaaatgcctgataaagatctaccaacgataagatatcacggacgtaagtttctagatactagagtagtatattgtcacatgtctaaacttcaagagagagattatatgattactagacgacagctatgttatcatgaaatgtttgataaaaatatgtataacgtgtcaacggcagtattgggacaacttaatctgatgaataatttagatactttatttcaggaacaggataaggaattgtacccaaatctgaaaataaataatggcgtgttatacggagaagaattggtaacgttaaacattagttccaaatttaagtactttatcaatcggatacagacactcaacggaaaacattttatatacttttctaattctacatatggtggattggtaattaaatatatcatgctcagtaatggatattctgaatataatggttctcagggaactaatccacatatgataaacggcaaaccaaaaacatttgctatcgttactagtaaaatgaaatcgtctttagaggatctattagatgtgtataattctcctgaaaacgatgatggtagtcaattgatgtttttgttttcatcaaacattatgtccgaatcctatactctgaaagaggtaaggcatatttggtttatgactatcccagatactttttctcaatacaaccaaattcttggacgatctattagaaaattctcttacgccgatatttctgaaccagttaatgtatatcttttagccgccgtatattccgatttcaatgacgaagtaacgtcattaaacgattacacacaggatgaattaattaatgttttaccatttgacatcaaaaagctgttgtatctaaaatttaagacgaaagaaacgaatagaatatactctattcttcaagagatgtctgaaacgtattctcttccaccacatccatcaattgtaaaagttttattgggagaattggtcagacaatttttttataataattctcgtattaagtataacgactccaagttacttaaaatggttacatcagttataaaaaataaagaagacgctaggaattacatagatgatattgtaaacggtcacttctttgtatcgaataaagtatttgataaatctcttttatacaaatacgaaaacgatattattacagtaccgtttagactttcctacgaaccatttgtttggggagttaactttcgtaaagaatataacgtggtatcttctccataaaactgatgagatatataaagaaataaatgtcgagctttgttaccaatggatacctttccgttacattggaacctcatgagctgacgttagacataaaaactaatattaggaatgccgtatataagacgtatctccatagagaaattagtggtaaaatggccaagaaaatagaaattcgtgaagacgtggaattacctctcggcgaaatagttaataattctgtagttataaacgttccgtgtgtaataacctacgcgtattatcacgttggggatatagtcagaggaacattaaacatcgaagatgaatcaaatgtaactattcaatgtggagatttaatctgtaaactaagtagagattcgggtactgtatcatttagcgattcaaagtactgcttttttcgaaatggtaatgcgtatgacaatggcagcgaagtcactgccgttctaatggaggctcaacaaggtatcgaatctagttttgtttttctcgcgaatatcgtcgactcataagaaagagaatagcggtaagtataaacacgaatactatggcaataattgcgaatgttttattcccttcgatatatttttgataatatgaaaaacatgtctctctcaaatcggacaaccatctcataaaatagttctcgcgcgctggagaggtagttgctgctcgtataatctccccagaataatatacttgcgtgtcgtcgttcaatttatacggatttctatagttctctgttatataatacggttttccatcatgattagacgacgacaatagtgttctaaatttagatagttgatcagaatgaatgtttattggcgttggaaaaattatccatacagcgtctgcagagtgcttgatagttgttcctagatatgtaaaataatccaacgtactaggtagcaaattgtctagataaaatactgaatcaaacggcgcagacgtattagcggatctaatggaatccaattgattgactatcttttgaaaatatacatttttatgatccgatacttgtaagaatatagaaataatgataagtccatcatcgtgtttttttgcctcttcataagaactatattttttcttattccaatgaacaagattaatctctccagagtatttgtacacatctatcaagtgattggatccataatcgtcttcctttccccaatatatatgtagtgatgataacacatattcattggggagaaaccctccacttatatatcctcctttaaaattaatccttactagttttccagtgttctggatagtggttggtttcgactcattataatgtatgtctaacggcttcaatcgcgcgttagaaattgcttttttagtttctatattaataggagatagttgttgcggcatagtaaaaatgaaatgataactgtttaaaaatagctcttagtatgggaattacaatggatgaggaagtgatatttgaaactcctagagaattaatatctattaaacgaataaaagatattccaagatcaaaagacacgcatgtgtttgctgcgtgtataacaagtgacggatatccgttaataggagctagaagaacttcattcgcgttccaggcgatattatctcaacaaaattcagattctatctttagagtatccactaaactattacggtttatgtactacaatgaactaagagaaatctttagacggttgagaaaaggttctatcaacaatatcgatcctcacttcgaagagttaatattattgggtggtaaactagataaaaaggaatctattaaagattgtttaagaagagaattaaaagaggaaagtgatgaacgtataacagtaaaagaatttggaaatgtaattctaaaacttacaacacgggataaattatttaataaagtatatataagttattgcatggcgtgttttattaatcaatcgttggaggatttatcgcatactagtatttacaatgtagaaattagaaagattaaatcattaaatgattgtattaacgacgataaatacgaatatctgtcttatatttataatatgctagttaatagtaaatgaacttttacagatctagtataattagtcagattattaagtataatagacgactagctaagtctattatttgcgaggatgactctcaaattattacactcacggcattcgttaaccaatgcctatggtgtcataaacgagtatccgtgtccgctattttattaactactgataacaaaatattagtatgtaacagacgagatagttttctctattctgaaataattagaactagaaacatgtttagaaagaaacgattatttctgaattattccaattatttgtccaaacaggaaagaagtatactatcgtcatttttttctctatatccagctactgctgataatgatagaatagatgctatttatccgggtggcatacccaaaaggggtgagaatgttccagagtgtttatccagggaaattaaagaagaagttaatatagacaattcttttgtattcatagacactcggttttttattcatggcatcatagaagataccattattaataaattttttgaggtaatcttctttgtcggaagaatatctctaacgagtgatcaaatcattgatacatttaaaagtaatcatgaaatcaaggatctaatatttttagatccgaattcaggtaatggactccaatacgaaattgcaaaatatgctctagatactgcaaaactcaaatgttatggccatagaggatgttattacgaatcattaaaaaaattaactgaggatgattgattagaaaatataaattaatttaccatcgtgtatttttataacgggattgtccggcatatcatgtagatagttaccgtctacatcgtatactcgaccatctacgcctttaaatcctctatttattgacattaatctattagaattggaataccaaatattagtaccctcaattagtttattggtaatattttttttagacgatagatcgatggctcttgaaaccaaggttttccaaccggactcattgtcgatcggtgagaagtctttttcattagcatgaatccattctaatgatgtatgtttaaacactctaaacaattggacaaattcttttgatttgctttgaatgatttcaaataggtcttcgtctacagtaggcataccattagataatctagccattataaagtgcacgtttacatatctacgttctggaggagtaagaacgtgactattgagacgaatggctcttcctactatctgacgaagagacgcctcgttccaagtcatatctagaatgaagatatcattgattgagaagaagctaataccctcgcctccactagaagagaatacgcatgttttaatgcattctccgttagtgtttgattcttggttaaactcagccaccgccttgattctagtatcttttgttctagatgagaactctatattagagataccaaagactttgaaatatagtaataagatttctattcctgactgattaacaaatggttcaaagactagacatttaccatgggatgctaatattcccaaacatacatctataaatttgacgcttttctcttttaattcagtaaatagagagatatcagccgcactagcatcccctttcaatagttctccctttttaaaggtatctaatgcggatttagaaaactctctatttcttaatgaatttttaaaatcattatatagtgttgctatctcttgcgcgtattcgcccggatcacgattttgtctttcaggaaagctatcgaacgtaaacgtagtagccatacgtctcagaattctaaatgatgatatacctgtttttatttcagcgagtttagccttttgataaatttcttcttgctttttcgacatattaacgtatcgcattaatactgttttcttagcgaatgatgcagacccttctacgtcatcaaaaatagaaaactcgttattaactatgtacgaacataggcctcctagtttggagactaattctttctcatcaactagacgtttattctcaaatagcgattggtgttgtaaggatcctggtcgtagtaagttaaccaacatggtgaattcttgcacactattgacgataggtgtagccgataaacaaatcatcttatggttttttaacgcaatggttttagataaaaaattatatactgaacgagtaggacggatcttaccatcttctttgattaatgatttagaaatgaagttatgacattcatcaataatgacgcatattctactcttggaattaatagttttgatattagtaaaaaatttatttctaaaattttgatcatcgtaattaataaaaatacaatccttcgttatctctggagcgtatctgagtatagtgttcatccaaggatcttctatcaaagcctttttcaccaataagataatagcccaattcgtataaatatccttaagatgtttgagaatatatacagtagtcattgttttaccgacacccgtttcatggaacaataaaagagaatgcatactgtctaatcctaagaaaactcttgctacaaaatgttgataatccttgaggcgtactacgtccgaccccatcatttcaacaggcatattagtagttctgcgcaatgcataatcgatataggccgcgtgtgatttactcatttatgagtgataagtaataactatgttttaaaaatcacagcagtagtttaactagtcttctctgatgtttgttttcgatacttttcgaatcagaagtcatactagaataaagcagcgagtgaacgtaatagagagcttcgtatactctattcgaaaactctaagaacttattaatgaattccgtatccactggatcgtttaaaatactaaattgaacactgttcacatccttccaagaagaagacttagtgacggacttaacatgagacataaataaatccaaattttttttacaaacatcactagccaccataatggcgctatctttcaaccagctatcgcttacgcattttagcagtctaacatttttaaagagactacaatatattctcatagtatcgattacacctctaccgaataaagttggaagtttaataatacaatatttttcgtttacaaaatcaaataatggtcgaaacacgtcgaaggttaacatcttataatcgctaatgtatagattgttttcagtgagatgattattagatttaatagcatctcgttcacgtttgaacagtttattgcgtgcgctgaggtcggcaactacggcgtccgctttagtactcctcccataatactttacgctattaatctttaaaatttcatagactttatctagatcgctttctggtaacatgatatcatgtgtaaaaagttttaacatgtcggtcggcattctatttagatcattaactctagaaatctgaagaaagtaattagctccgtattccagactaggtaatgggcttttacctagagacagattaagttctggcaatgtttcataaaatggaagaaggacatgcgttccctcccggatattttttacaatttcatccatttacaactctatagtttgttttcattattattagttattatctcccataatcttggtaatacttaccccttgatcgtaagataccttatacaggtcattacatacaactaccaattgtttttgtacataatagattggatggttgacatccatggtggaataaactactcgaacagatagtttatctttccccctagatacattggccgtaatagttgtcggcctaaagaatatctttggtgtaaagttaaaagttagggttcttgttccattattgctttttgtcagtagttcattataaattctcgagatgggtccgttctctgaatatagaacatcatttccaaatctaacttctagtctagaaataatatcggtcttattcttaaaatctattcccttgatgaagggatcgttaatgaacaaatccttggcctttgattcggctgatctattatctccgttatagacgttacgttgactagtccaaagacttacaggaatagatgtatcgatgatgttgatactatgtgatatgtgagcaaagattgttctcttagtggcatcactatatgttccagtaatggcggaaaactttttagaaatgttatatataaaagaattttttcgtgttccaaacattagcagattagtatgaagataaacactcatattatcaggaacattatcaatttttacatacacatcagcatcttgaatagaaacgataccatcttctggaacctctacgatctcggcagactccggataaccagtcggtgggccatcactaacaataactagatcatccaacaatctactcacatatgcatctatataatctttttcatcttgtgagtaccctggatacgaaataaatttattatccgtatttccataataaggtttagtataaacagagagcgatgttgccgcatgaacttcagttacagtcgccgttggttggtttatttgacctattactctcctaggtttctctataaacgatggtttaatttgtacattcttaaccatatatccaataaagctcaattcaggaacataaacaaattctttgttgaacgtttcaaagtcgaacgaagagtcacgaataacgatatcggatactggattgaaggttaccgttacggtaatttttgaatcggatagtttaagactgctgaatgtatcttccacatcaaacggagttttaatataaacgtatactgtagatggttctttaatagtgtcattaggagttaggccaatagaaatatcattaagttcactagaatatccagagtgtttcaaagcaattgtattattgatacaattattatataattcttcgccctcaatttcccaaataacaccgttacacgaagagatagatacgtgattaatacatttatatccaacatatggtacgtaaccgaatcttcccatacctttaacttctggaagttccaaactcagaaccaaatgattaagcgcagtaatatactgatccctaatttcgaagctagcgatagcctgattgtctggaccatcgtttgtcataactccggatagagaaatatattgcggcatatataaagttggaatttgactatcgactgcgaagacattagaccgtttaatagagtcatccccaccgatcaaagaattaatgatagtattattcattttctatttaaaatggaaaaagcttacaataaactccgtagagaaatatctataatttgtgagttttccttaaagtaacagcttccgtaaacgccgtctttatctcttagtaagtttattgtatttataaccttttccttatcttcatagaatactaaaggcaacaaagaaatttttggttcttctctaagagctacgtgagacttaaccatagaagccaacgaatccctacatattttagaacagaaataccctacttcaccacccttgtatgtctcaatactaataggtctaaaaaccaaatcttgattacaaaaccaacacttatcaattacactatttgtcttaatagacacatctgccatagatttataatactttggtagtatacaagcgagtgcttcttctttagcgggcttaaagactgctttaggtgctgaaataaccacatctggaaggcttactcgcttagccatttaattacggaactatttttttatacttctaatgagcaagtagaaaacctctcatctacaaaaacgtactcgtgtccataatcctctaccatagtaacacgttttttagatctcatatgtgctaaaaagttttcccatactaattggttactattatttttcgtataatttttaacagtttgaggttttagatttttagttacagaagtgatatcgaatattttatccaaaaagaatgagtaattaattgtcttagaaggagtgttttcttggcaaaagaataccaagtgcttaaatatttctactacttcattaatcttttctgtactcagattcagtttctcatcttttacttgattgattatttcaaagactaacttataatcctttttatttattctctcgttagccttaagaaaactagatacaaaatttgcatctacatcatccgtggatatttgatttttttccatgatatccaagagttccgagataatttctccagaacattgatgagacaataatctccgcaatacatttctcaaatgaataagtttattagacacgtggaagtttgactttttttgtacctttgtacatttttgaaataccgactcgcaaaaaatacaatattcatatccttgttcagatactataccgttgtgtctacaaccgctacataatcgtagattcatgttaacactctacgtatctcgtcgtccaatattttatataaaaacattttatttctagacgttgccagaaaatcctgtaatatttttagttttttgggctgtgaataaagtatcgccctaatatggttaccgtcctccgccaatatagtagttaaattatccgcacatgcagaagaacacgcttaggcggattcagtacaatgttatatttttcgtaccaactcatttaaatatcataatctaaaatagttctgtaatatgtctagcgctaatatattgatcataatcctgtgcataaattaagatacaacaatgtctcgaaatcatcgacatggcttcttccatagttagaagatcgtcgtcaaagttagcaacgtgattcatcaacatttgctgttttgaggcagcaaatactgaaccatcgccattcaaccattcataaaaaccatcgtctgaatccattgataatttcttgtactggtttttgagagctcgcatcaatctagcatttctagctcccggattgaaaacagaaagaggatcgtacatccagggtccattttctgtaaatagaatcgtataatgtcccttcaagaagatatcagacgatccacaatcaaagaattggtctccgagtttgtaacaaactgcggactttaacctatacatgataccgtttagcataatttctggtgatacgtcaatcggagtatcatctattagagatctaaagccggtgtaacattctccaccaaacatattcttattctgacgtcgttctacataaaacatcattgctccattaacgataacaggggaatgaacagcactacccatcacattagttcccaatggatcaatgtgtgtaactccagaacatcttccatatcctatgttaggaggagcgaacaccactcttccactattgccatcgaatgccatagaataaatatccttggaattgatagaaatcggactgtcggatgttgtgatcatcttcataggattaacaacgatgtatggtgccgcctgaagtttcatatcgtaactgatgccgtttataggtctagccacagaaaccaacgtaggtctaaatccaactatagacaaaatagaagccaatatctgttcctcatctgtcataacttgagagcatccagtatgaataatcttcattagatggggatctaccgcatcatcatcgttacaataaaaaattcccattctaatgttcataattgcttttctaatcatggtatgcatgtttgctctctgaatctctgtggaaattagatctgatacacctgtaatcactatcggattatcctccgtaagacgattaaccaacaacatataattataagactttacttttctaaattcataaagttgctggattaggctataggtgtctccatgtacatacgcgttctcgagcgcaggaagtttaataccgaatagtgccatcagaataggatgaatatagtaattagtttctggttttctataaataaaagacaaatcttgtgaactagacatatcggtaaaatgcatggattggaatcgtgtagtcgacagaagaatatgatgattagatggagagtatattttatctaactctttgagttggtcaccgattctaggactagctcgagaatgaataagtactaaaggatgagtacatttcacagaaacactagcattgttcaatgtgctctttacatgggtaaggagttgaaatagctcgtttctatttgttctgacaatatttagtttattcataatgttaagcatatcctgaatagtaaagttagatgtgtcatacttgttagtagttagatatttagcaattgcattcccatcatttctcaatctcgtactccaatcatgtgtagatgctacttcatctatagaaaccatacaatcctttttgataggctgttgagattgattatttcctgcacgtttaggtttggtacgttgatttctagcccctgcggatataaagtcatcgtctacaatttgggacaatgaattgcatacactacaagacaaagatttatcagaagtgtgaatatgatcttcatctaccaaagaaagagtttgattagtataactagattttagtcctgcgttagatgttaaaaaaacatcgctattgaccacggcttccattatttatattcgtagtttttactcgaaagcgtgattttaatatccaatcttattacttttggaatcgttcaaaacctttgactagttgtagaatttgatctattgccctacgcgtatactcccttgcatcatatacgttcgtcaccagatcgtttgtttcggcctgaagttggtgcatatctttttcaacactcgacatgagatccttaagggccatatcgtctagattttgttgagatgctgctcctggatttggattttgttgtgctgttgtacatactgtaccaccagtaggtgtaggagtacatacagtggccacaataggaggttgaggaggtgtaaccgttggagtagtacaagaaatatttccatccgattgttgtgtacatgtagttgttggtaacgtctgagaaggttgggtagatggcggcgtcgtcgttttttgatctttattaaatttagagataatatcctgaacagcattgctcggcgtcaacgctggaaggagtgaactcgccggcgcatcagtatcttcagacagccaatcaaaaagattagacatatcagatgatgtattagtttgttgtcgtggttttggtgtaggagcagtactactaggtagaagaataggagccggtgtagctgttggaaccggctgtggagttatatgaatagttggttgtagcggttggataggctgtctgctggcggccatcatattatctctagctagttgttctcgcaactgtctttgataatacgactcttgagactttagtcctatttcaatcgcttcatcctttttcgtatccggatccttttcttcagaataatagattgacgactttggtgtagaggattctgccagcccctgtgagaacttgttaaagaagtccatttaaggctttaaaattgaattgcgattataagattaaatggcagacacagacgatattatcgactatgaatccgatgatctcactgaatacgaggatgatgaagaagaggaagaagatggagagtcactagaaactagtgatatagatcccaaatcttcttataagattgtagaatcagcatccactcatatagaagatgcgcattccaatcttaaacatatagggaatcatatatctgctcttaaacgacgctatactagacgtataagtctatttgaaatagcgggtataatagcagaaagctataacttgcttcaacgaggaagattacctctagtttcagaattttctgacgaaacgatgaagcaaaatatgctacatgtaattatacaagagatagaggagggttcttgtcctatagtcatcgaaaagaacggagaattgttgtcggtaaacgattttgacaaagatggtctaaaattccatctagactatattatcaaaatttggaaacttcaaaaacgatattagaatttatacgaatatcgttctctaaatgtcacaatcaagtctcgcatgttcagcaatttattgtcgtactttatatcgtgttcattaacgatatcttgcaaaatagtaatgattctatcttccttcgatagatattcttcagagattattgtcttatattctttcttgttatcagatatgaatttgataagactttgaacattattgatacccgtctgtttaattttttctacagatattttagttttggcagattctatcgtatctgtcaatagacatccaacatcgacattcgacgtcaattgtctataaatcaacgtataaattttagaaataacattagcgaattgttgtgcattgatgtcgttattctgaaacagtatgattttaggtagcattttcttaacaaagagaacgtatttattgttactcagttgaacagatgatatatccagattactaacgcatctgattccgtataccaaactttcagaagaaatggtatacaattgtttgtattcattcaatgtctctttttcagaaattagtttagagtcgaatactgcaataattttcaagagatagttttcatcagataagattttatttagtgtagatatgataaaactattgttttgttggagaacttgatacgccgcgttctctgtagtcgacgctctcaaatgggaaacaatctccattatttttttggaatcggatacaatatcttcggtatcttgacgcagtctagtatacatagagttaagagagattagagtttgtacattaagcaacatgtctctaaatgtggctacaaacttttccttttccacatcatctagtttattatataccgatttcacaacggcaccagatttaaggaaccagaatgaaaaactctgataactacaatatttcatcatagttacgattttatcatcttctatagttggtgtgatagcgcatacctttttctccaagactggaaccaacgtcataaaaatgtttaaatcaaaatccatatcaacatctgatgcgctaagaccagtctcgcgttcaagattatctttactaatggtgacgaactcatcgtataaaactctaagtttgtccattatttatttacagatttagttgtttaatttatttgtgctcttccagagttgggatagtatttttctaacgtcggtattatattattaggatctacgttcatatgtatcataatattaatcatccacgttttgataaatctatctttagcttctgaaataacgtatttaaacaaaggagaaaaatatttagctacggcatcagacgcaataacattttttgtaaatgtaacatatttagacgacagatcttcgttaaaaagttttccatctatgtagaatccatcagttgttaacaccattcccgcgtcagattgaataggagtttgaatagtttgttttggaaatagatccttcaataacttatagttgggtgggaaaaaatcgattttatcactagactctttcttttttactatcattacctcatgaactatttcttgaatgagtatatgtattttctttcctatatcggacgcgttcattggaaaatataccatgtcgttaactataagaatatttttatcctcgtttacaaactgaataatatcagatgtagttcgtaaacgaactatatcatcaccagcacaacatctaactatatgatatccactagtttcctttagtcgtttattatcttgttccatattagcagtcattccatcatttaagaaggcgtcaaagataatagggagaaatgacattttggattctgttacaactttaccaaaattaaggatatacggacttactatctttttctcaacgtcaatttgatgaacacacgatgaaaatgtacttcgatgagattgatcatgtagaaaacaacaagggatacaatatttccgcatatcatgaaatatattaagaaatcccaccttattatatttccccaaaggatccatgcacgtaaacattatgccgttatcattaataaagacttctttctcatcggatctgtaaaagttgttactgatttttttcattccaggatctagataattaataatgatgggttttctattcttattctttgtattttggcatatcctagaccagtaaacagtttccactttggtaaaatcagcagacttttgaacgctattaaacatggcattaatggcaataactaaaaatgtaaaatatttttctatgttaggaatatggtttttcactttaatagatatatggtttttggccaaaatgatagatatttttttatccgaggatagtaaaatattattagtcgccgtctctataaaaatgaagctagtctcgatatccaattttattctagaattgataggagtcgccaaatgtaccttatacgttatatctcccttgatgcgttccatttgtgtatctatatcggacacaagatctgtaaatagttttacgttattaatcatcacggtatcgccgtcgctagataatgctaatgtaccatccaagtcccaaatggagagatttaactgttcatcgtttagaataaaatgattaccggtcatattaataaagtgttcatcgtatctagataacaacgacttataattaatgtccaagtcttgaactcgctgaatgatcttttttaacccagttagttttagattggtacgaaatatattgttaaactttgattctacagtaatgtccaaatctagttgtggaaatacttccatcaacattgtttcaaacttgataatattattatctacatcttcgtacgatccaaattccggaatagatgtatcgcacgctctgaccacccagataaccaaaaagtcacacgctccaggatatacattgtataaaaagctatcgttttttagtagtgtttttttctgagtatatacgaagggattaaaaatagtattatcaacgtaactatattccaaattattcttatgagaatagataataatatcgtccttaatatctaacaaatttcctaaatatccctttaattgagtcattcgaagcgtcaatagaatatgtctcttaactatttccggctgttgtatatttaaatgacttcgtaaaaaataatatatgggcgacttctcatctatgtaatcatatggagtgagatatagggctcgttctacctcctgccccttacccacctgtaataccaattgcggacttactatatatcgcatatttatatcgtggggtaaagtgaaaatctactaccgatgatgtaagtcttacaatgttcgaaccagtaccagatcttaatttggaggcctccgtagaactaggggaggtaaatatagatcaaacaacacctatgataaaggagaatagcggttttatatcccgcagtagacgtctattcgcccatagatctaaggatgatgagagaaaactagcactacgattctttttacaaagactttattttttagatcatagagagattcattatttgttcagatgcgttgacgctgtaaaagacgtcactattaccaaaaaaaataacattatcgtggcgccttatatagcacttttaactatcgcatcaaaaggatgcaaacttacagaaacaatgattgaagcattctttccagaactatataatgaacatagtaagaaatttaaattcaactctcaagtatccatcatccaagaaaaactcggataccagtttggaaactatcacgtttatgattttgaaccgtattactctacagtagctctggctattcgagatgaacattcatctggcatttttaatatccgtcaagagagttatctggtaagttcattatctgaaataacatatagattttatctaattaatctaaaatctgatcttgttcaatggagtgctagtacgggcgctgtaattaatcaaatggtaaatactgtattgattacagtgtatgaaaagttacaactggtcatagaaaatgattcacaatttacatgttcattggctgtggaatcagaacttccaataaaattacttaaagatagaaatgaattatttacaaaattcattaacgagttaaaaaagaccagttcattcaagataagcaaacgcgataaggatacgctattaaaatattttacttaggactggagttagaatttatagacgactcatttcgtttatcattattactaccatcattattagtattcttcttgtcatcttgttcagaaatatacagcaatgctatacctaatactaaatacattatcatgctcgcaatggctctaacaacaacgaaccaaaatgaatttggtcgtagcttttgttcacaaaaatacataaagaaatgtctacataaatctatggcgccattggctacttgaaatagcgccagtcctcctacagattttaatatagctgtataacatgacatttattcatcatcaaaagagacagagtcaccatctgtcatatttagattttttttcatgtgttcaaagtatcctctactcatttcattataatagtttatcatacttagaattttaggacggatcaatgagtaagacttgactagatcgtcagtagtaatttgtgcatcgtctattctgcatccgcttcgtcgaataatgtatagcatcgctttgagattctccatagctatcaagtctttatacaatgacatggaaatatctgtgaatactttatacttctccaacatcgatgccttaacatcatcgcctactttagcattgaaaatacgttctattgtgtagatggatgtagcaagatttttaaacaacaatgccattttacacgatgattgcctcaagtctccaatcgtttgtttagaacgattagctacagagttcaacgcttggctgactagcatattattatctttagaaattgtattcttcaatgaggcgtttatcatatctgtgatttcgttagtcatattacagtctgactgggttgtaatgttatccaacatatcacctatggatacggtacacgtaccagcatttgtaataatcctatctaagatgttgtatggcattgcgcagaaaatatcttctcctgtaatatctccactctcgataaatctactcagattattcttaaatgccttattctctggagaaaagatatcagtgtccatcatttcattaatagtatacgcagaaaagataccacgagtatcaattctatccaagatacttatcggttccgagtcacagataatggtttcctctccttcgggagatcctgcatagaaatatctaggacaatagtttctatactgtctgtaactctgataatctctaaagtcactaactgataccatgaaattgagaagatcaaacgctgaagtaattaatttttctgcctcgtttttactacaactagttttcatcaatgtagtgacgatgtattgtttagttactcttggtctaatactgatgatagagatattattacttcccataatggatcttctagtagtcaccttaaagcccattgatgcaaatagcagatagataaagtcttggtatgactcctttctaatatagtacggactacctttgtcacccaactttatacccacataagccataacaacctctttaatagccgtttcatgaggtttatcagccatgagcctgagtagttggaagaatctcatgaatcccgtctcagaaagtcctatatgcatgatagatttatctttcctgggaaactctcgtatagtcatagatgaaatactcttcaaagtttctgaaataagattagtaacagtcttacctccgactactctaggtaacaaacaaactctaataggtgttttctctgcggagataatatcagaaaggatagagcaataagtagtattattgtgattataaagaccgaatacataacaggtagaatttataaacatcatgtcctgaaggtttttagacttgtattcctcgtaatccataccgtcccaaaacatggatttggtaactttgatagccgtagatctttgttccttcgccaacaggttaaagaaattaataaagaatttgttgtttctatttatgtccacaaattgcacgtttggaagcgccacggttacattcactgcagcattttgaggatcgcgagtatgaagtacgatgttattgtttactggtatatctggaaagaaatctaccagtctaggaataagagattgatatcgcatagaaatacaaaagttcataatctcatcatcgaagagcattttgttaccattgtaataaatatccactctgtcatatgtataaatgaagtactgttcaaacatgatgagatgtttatatgttggcatagtagtgagatcgacgtttggtaatggcaatgtattaagattaactccataatgtctagcagcatctgcgatgttataagtgttgtcaaagcggggtcgatcttgtgctgttatatattgtctaacacctataagattatcaaaatcttgtctgcttaatacaccgttaacaatttttgccttgaattcttttattggtgcattaataacatccttatagaggatgttaaacaaataagtattatcaaagttaagatctgggtatttcttttctgctagaacatccattgagtcggagccatctggtttaatataaccaccgataaatctagctctgtattctgtatccgtcaatctaatattaagaaggtgttgagtgaaaggtggaagatcgtaaaagctgtgagtattaatgataggattagtttccgaactaatgttaattggggtattaataatatctatatttccagcgttaagtgtaacattaaacagttttaattcacgtgacgtggtatcaattaaataattaatgcccaatttggatatagcagcctgaagctcatcttgtttagttacggatcctaatgagttattaagcaatatatcgaacggatgaacgaaggttgttttgagtttgtcgcatactttgtaatctagacatagatgcggaagaacggtagaaactatacgaaataaatattcagagtcctctaattgatcaagagtaactattgacttaataggcatcatttatttagtattaaatgacgaccgtaccagtgacggatatacaaaacgatttaattacagagttttcagaagataattatccatctaacaaaaattatgaaataactcttcgtcaaatgtctattctaactcacgttaacaacgtggtagatagagaacataatgccgccgtagtgtcatctccagaggaaatatcctcacaacttaatgaagatctatttccagatgatgattctccggccactattatcgaaagagtacaacctcatactactattattgacgatactccacctcctacgtttcgtagagagttattgatatcggaacaacgtcaacaacgagaaaaaagatttaatattacagtatcgaaaaatgctgaagcaataatggaatctagatctatgatatcttctatgccaacacaaacaccatccttgggagtagtttatgataaagataaaagaattcagatgttggaggatgaagtggttaatcttagaaatcaacgatctaatacaaaatcatctgataatttagataattttaccagaatactatttggtaagactccgtataaatcaacagaagttaataagcgtatagccatcgttaattatgcaaatttgaacgggtctcccttatcagtcgaggacttggatgtttgttcagaggatgaaatagatagaatctataaaacgattaaacaatatcacgaaagtagaaaacgaaaaattatcgtcactaacgtgattattattgtcataaacattatcgagcaagcattgctaaaactcggatttgaagaaatcaaaggactgagtaccgatatcacttcagaaattatcgatgtggagatcggagatgactgcgatgctgtagcatctaaactaggaatcggtaacagtccggttcttaatattgtattgtttatactcaagatattcgttaaacgaattaaaattatttaatttaatacattcccatatccagacaacaatcgtctggattaatctgttcctgtcgtctcataccggacgacatattaatctttttattagtaggcatctttttagatggtttctttttcccagcattaactgagtcgatacctagaagatcgtgattgatctctccgaccattccacgaacttctaattggccgtctctgacggtaccataaactattttaccagcattagtaacagcttggacaatctgaccatccatcgcattgtacgatgtagtagtaactgttgttctacgtctaggagcaccagaagtatttttggagcccttggaggttgatgtagaagaagacgaggattttgattttggtttacatgtaatacattttgaactctttgattttgtatcacatgcgccggcagtcacatctgtttgagaattaagattattgttgcctcctttgacggctgcatctccaccgatttgcgctagtagatttttaagctgtggtgtaatcttattaactgtttcgatataatcatcgtaactgcttctaacggctaaattttttttatccgccatttagaagctaaaaatatttttatttatacagaagatttaactagattatacaatgaactaatatgatccttttccagattatttacaaacttggtattttttggttctggaggaggcgaatttaaattcggacttggattcggattttgtgagttcttgatcttattatacatcgagtataggatggcgacggtaactgctacgcaaataccgatcaacaaaagaataccaatcatttattgacaataacttcactattgatcaagtatgcaatatatcatcttttcactaaataagtagtaataatgattcaacaatgtcgagatatatggacgataataatttagttcatggaaatatcgctatgattggtatgaatgactccgctaactctgtggggtgcgcagtgctttccccacatagaataaattagcattccgactgtgataataataccaagtataaacgccataatactcaatactttccatgtacgagtgggactggtagacttactaaagtcaataaaggcgaagatacacgaaagaatcaaaagaatgattccagcgattagcacgccggaaaaataatttccaatcataagcatcatgtccatttaactaataaaaattttaaatcgccgaatgaacaaagtggaatataaaccatataaaaacaatagtttgtactgcaaaaataatatctatttttgttttcgaagatatggtaaaattaaatagtagtacacagcatgttataactaacagcagcaacggctcgtaattacttatcatttactagacgaaaaggtggtgggatattttcttgctcaaataatacgaatatatcacccatccattttatgcgatgtttatatactctaatctttaatagatctatagacgacgggtttaccaacaatatagattttatcgattcatctaatttaaacccttccttaaacgtgaatgatctattatctggcataacgatgactctacctgatgaatcggacaatgtactgggccatgtagaataaattatcaacgaattatcgtctacgaacatttatatcatttgttttaattttaggacgcgaataaatagatataaaatagaaaataacagatattacaaccaatgttatggccgcgcccaaccaggtaggcagttttattttatcttttactacaggttctcctggatgatgtacgtcaccaacggcggacgtagttctagtacaattagacgtaagttctgcttgggaattttttaacgctaaagagttaacgttaatcgtgcacccaacgtatttacatctagttctttgaacatcttgattataatataaccattttctatctctagattcgtcggtgcactcatgtaaccaacataccctaggtcctaaatatttatctccggaattagattttggataattcgcgcaccaacaatttctatttcctttatgatcgttacaaaagacgtataatgccgtatccccaaaagtaaaataatcaggacgaataattctaataaactcagaacaatatctcgcatccatatgtttggagcaaatatcggaataagtagacatagccggtttccgttttgcacgtaaccattctaaacaattggggtttccaggatcgtttctacaaaatccagtcatgaaatcgtcacaatgttctgtcttgtaattattattaaatatttttggacagtgtttggtatttgtcttagaacaacattttgctacgctatcactatcgcccaggagataatccttttttataaaatgacatcgttgcccggatgctatataatcagtagcgtgttttaaatccttaatatattcaggagttacctcgttctgataatagattaatgatccaggacgaaatttgaaagaactacatggttctccatgaattaatacatattgtttagcaaattcaggaactataaaactactacaatgatctatcgacataccatctatcaaacaaaatttgggtttaatttctcccggagatgtttcataatagtacgtataactttcttctgcaaacttaacagctctattatattcaggataattaaaacctaattccatatatttgtctcgtatatctgctattcctggtgctattttgattctattaagagtaacagctgcccccattcttaataatcgtcagtatttaaactgttaaatgttggtatatcaacatctaccttatttcccgcagtataaggtttgttgcaggtatactgttcaggaatggttacatttatacttcttctatagtcctgtctttcgatgttcatcacatatgcaaagaacagaataaacaaaataatgtaagaaataatattaaatatctgtgaattcgtaaatacattgattgccataataattacagcagctacaatacacacaatagacattcccacagtgttgccattacctccacgatacatttgagttactaagcaataggtaataactaagctagtaagaggcaatagaaaagatgagataaatatcatcaatatagagattagaggagggctatatagagccaagacgaacaaaatcaaaccgagtaacgttctaacatcattatttttgaagattcccaaataatcattcattcctccataatcgttttgcatcatacctccatctttaggcataaacgattgctgctgttcctctgtaaataaatctttatcaagcactccagcacccgcagagaagtcgtcaagcatattgtaatatcttaaataactcatttatatattaaaaaatgtcactattaaagatggagtataatctttatgccgaactaaaaaaaatgacttgtggtcaacccctaagtctttttaacgaagacggggatttcgtagaagttgaaccgggatcatcctttaagtttctgatacctaagggattttacgcctctccttccgtaaagacgagtctagtattcgagacattaacaacgaccgataataaaatcactagtatcaatccaacaaatgcgccaaagttatatcctcttcaacgcaaagtcgtatctgaagtagtttctaatatgaggaaaatgatcgaatcaaaacgtcctctatacattactcttcacttggcgtgtggatttggtaagactattaccacgtgttatcttatggctacacacggtagaaaaaccgtcatttgcgtacccaataaaatgttaatacatcaatggaagacacaggtagaggcagtcggattggaacataagatatccatagatggagtaagtagtctattaaaggaactaaagactcaaagtccggatgtattaatagtagtcagtagacatctgacaaacgatgccttttgtaaatatatcaataagcattatgatttgttcatcttggatgaatcacatacgtataatctgatgaacaatacagcagttacaagatttttagcgtattatcctccgatgatgtgttattttttaactgctacacctagaccagctaaccgaatttattgtaacagtattattaatattgccaagttatccgatctaaaaaaaactatctatgcggtagatagtttttttgagccatattccacagataatattagacatatgataaaacgattagatggaccatctaataaatatcatatatatactgagaagttattatctgtagacgagcctagaaatcaacttattcttgataccctggtagaagaattcaagtcaggaactattaatcgaattttagttattactaaactacgtgaacatatggtattcttctacaaacgattattagatcttttcggaccagaggttgtatttataggagacgcccaaaatagacgtactccagatatggtcaaatcaatcaaggaactaaatagatttatattcgtatccaccttattttattccggtactggtttagatattcctagtttggattcgttgttcatttgctcggcagtaatcaacaatatgcaaatagagcaattactagggagggtatgtcgagaaacagaactattagataggacggtatatgtatttcctagcacatccatcaaagaaataaagtacatgataggaaatttcatgcaacgaattattagtctgtctgtagataaactaggatttaaacaaaaaagttatcggaaacatcaagaatccgatcccacttctgtatgtacaacatcctccagagaagaacgtgtattaaatagaatatttaactcgcaaaatcgttaagaagtttaagcgacgatccgcatgctgcgcaggccagtgtattacccctcatagtattaatataatccaatgatacttttgtgatgtcggaaatcttaaccaatttagactgacaggcagaacacgtcatgcaatcatcatcgtcatcgataactgtagtcttgggcttctttttgcggctcttcattccggaacgcacattggtgctatccatttaggtagtaaaaaataagtcagaatatgccctatagcacgatcgtgcaaaacctggtatatcgtctctatctttatcacaatatagtgtatcgacatctttattattattgacttcgtttatcttggaacatggaatgggaacatttttgttatcaacggccacctttgccttaattccagatgttgtaaaattataactaaacagtctatcatcgacacaaatgaaattcttgtttagacgtttgtagtttacgtatgcggctcgttcgcgtctcattttttcagatattgcaggtactataatattaaaaataagaatgaaataacataggattaaaaataaagttatcatgacttctagcgctgatttaactaacttaaaagaattacttagtctgtacaaaagtttgagattttcagattctgcggctatagaaaagtataattctttggtagaatggggaacatctacttactggaaaataggcgtgcaaaaggtagctaatgtcgagacgtcaatatctgattattatgatgaggtaaaaaataaaccgtttaatattgatccgggctattacattttcttaccggtatattttgggagcgtctttatttattcgaagggtaaaaatatggtagaacttggatctggaaactcttttcaaataccagatgatatgcgaagtgcgtgtaacaaagtattagacagcgataacggaatagactttctgagatttgttttgttaaacaatagatggataatggaagatgctatatcaaaatatcagtctccagttaatatatttaaactagctagtgagtacggattaaacatacccaaatatttagaaattgaaatagaggaagacacattatttgacgacgagttatactctattatagaacgctcttttgatgataaatttccaaaaatatccatatcgtatattaagttgggagaacttagacggcaagttgtagactttttcaaattctcgttcatgtatattgagtccatcaaggtagatcgtataggagataatatttttattcctagcgttataacaaaatcaggaaaaaagatattagtaaaagatgtagaccatttaatacgatccaaggttagagaacatacatttgtaaaagtaaaaaagaaaaacacattttccattttatacgactatgatggaaacggaacagaaactagaggagaagtaataaaacgaattatagacactataggacgagactattatgttaacggaaagtatttctctaaggttggtagtgcaggcttaaagcaattgactaataaattagatattaatgagtgcgcaactgtcgatgagttagttgatgagattaataaatccggaactgtaaaacgaaaaataaaaaaccaatcagcatttgatttaagcagagaatgtttgggatatccagaagcggattttataacgttagttaataacatgcggttcaaaatagaaaattgtaaggttgtaaatttcaatattgaaaatactaattgtttaaataacccgagtattgaaactatatatagaaactttaaccagttcgtctcaatctttaatgtcgtcaccgatgtcaaaaaaagattattcgagtgaaataatatgcgcctttgatataggtgcaaaaaatcctgccagaactgttttagaagtcaaggataactccgttagggtattggatatatcaaaattagactggagttctgattgggaaaggcgcatagctaaagatttgtcacaatatgaatacactacagttcttctagaacgtcagcctagaaggtcgccgtatgttaaatttatctattttattaaaggctttttatatcatacatcggctgccaaagttatttgcgtctcgcctgtcatgtctggtaattcatatagagatcgaaaaaagagatcggtcgaagcatttcttgattggatggacacattcggattgcgagactccgttccggatagacgcaaattagacgatgtagcggatagtttcaatttggctatgagatacgtattagataaatggaatactaattatacaccttataataggtgtaaatctaggaattacataaaaaaaatgtaataacgttagtaacgccattatggataatctatttacctttctacatgaaatagaagatagatatgccagaactatttttaactttcatctaataagttgcgatgaaataggagatatatatggtcttatgaaagaacgaatttcctcagaggatatgtttgataatatagtgtataataaagatatacatcatgccattaagaaactagtgtattgcgacatccaacttactaaacacattattaatcagaatacgtatccggtatttaacgattcttcacaagtgaaatgttgtcattatttcgatataaactcagataatagcaatattagctctcgtacagtagagatatttgagagggaaaagtcatctcttgtatcatatattaaaactaccaataagaagagaaaggtcaattacggcgaaataaagaaaactgttcatggaggcactaatgcaaattacttttccggtaaaaagtctgatgagtatctgagtactacagttagatccaacattaatcaaccttggatcaaaaccatttctaagagaatgagagtagatatcattaatcactctatagtaacgcgtggaaaaagctctatattacaaactatagaaattatttttactaatagaacatgtgtgaaaatattcaaggattctactatgcacattattctatccaaggacaaggatgaaaaggggtgtatacacatgattgacaaattattctatgtctattataatttatttctgttgttcgaagatatcatccaaaacgagtactttaaagaagtagctaatgttgtaaaccacgtacttacggctacggcattagatgagaaattattcctaattaagaaaatggctgaacacgatgtttatggagttagcaatttcaaaatagggatgtttaacctgacatttattaagtcgttggatcataccgttttcccctctctgttagatgaggatagcaaaataaagttttttaaggggaaaaagctcaatattgtagcattacgatctctggaggattgtataaattacgtgactaaatccgagaatatgatagaaatgatgaaggaaagatcgactattttaaatagcatagatatagaaacggaatcggtagatcgtctaaaagaattgcttctaaaatgaaaaaaaacactgattcagaaatggatcaacgactcggatataagtttttggtgcctgatcctaaagccggagttttttatagaccgttacatttccaatatgtatcgtattctaattttatattgcatcgattgcatgaaatcttgaccgtcaagcggccactcttatcgtttaagaataatacagaacgaattatgatagaaattagcaatgttaaagtgactcctccagattactcacctataatcgcgagtattaaaggtaagagttatgacgcattagccacgttcactgtaaatatctttaaagaggtaatgaccaaagagggtatatccatcactaaaataagtagttatgagggaaaagattctcatttgataaaaattccgctactaataggatacgggaataaaaatccacttgatacagccaagtatcttgttcctaatgtcataggtggagtctttatcaataaacaatctgtcgaaaaagtaggaattaatctagtagaaaagattacaacatggccaaaatttagggttgttaagccaaactcattcactttctcgttttcctccgtatcccctcctaatgtattaccgacaagatatcgccattacaagatatctctggatatatcacaattggaagcgttgaatatatcatcgacaaagacatttataacggtcaatattgttttgctgtctcaatatttatctagagtgagtctagaattcattagacgtagcttatcatacgatatgcctccagaagttgtctatctagtaaacgcgataatagatagtgctaaacgaattactgaatctattactgactttaatattgatacatacattaatgacctggtggaagctgaacacattaaacaaaaatctcagttaacgatcaacgagttcaaatatgaaatgctgcataactttttacctcatatgaactatacacccgatcaactaaagggattttatatgatatctttactaagaaagtttctctactgtatctaccacacttctagatatccagatagagattcgatggtttgtcatcgtatactaacatacggcaaatattttgagacgttggcacatgatgaattagagaattacataggcaacatccgaaacgatatcatgaacaatcacaagaacagaggcacttacgcggtaaacattcatgtactaacaactcctggacttaatcatgcattttctagcttattgagtggaaagttcaaaaagtcagacggtagttatcgaacacatcctcactattcatggatgcagaatatttctattcctaggagtgttggattttatccggatcaagtaaagatttcaaagatgttttctgtcagaaaataccatccaagtcaatatctttacttttgttcatcagacgttccggaaagaggtcctcaggtaggtttagtatctcaattgtctgtcttgagttccattacaaatatactaacgtctgagtatttggatttggaaaagaaaatttgtgagtatatcagatcatattataaagatgatataagttactttgaaacaggatttccaatcactatagaaaatgctctagtcgcatctcttaatccaaatatgatatgtgattttgtaactgactttagacgtagaaaacggatgggattcttcggtaacttggaggtaggtattactttagttagggatcacatgaatgaaattcgcattaatattggagcgggaagattagtcagaccattcttggttgtggataacggagagctcatgatggatgtgtgtccggagttagaaagcagattagacgatatgacattctctgacattcagaaagagtttccacatgtcatcgaaatggtagatatagaacaatttacttttagtaacgtatgtgaatcggttcaaaaatttagaatgatgtcaaaggatgaaagaaagcaatacgatttatgtgactttcctgccgaatttagagatggatatgtggcatcttcattagtgggaatcaatcacaattctggacccagagctattcttggatgtgctcaagctaaacaagctatctcttgtctgagttcggatatacgaaataaaatagacaatggaattcatttgatgtatccagagaggccaatcgtgattagtaaggctttagaaacttcaaagattgcggctaattgcttcggccaacatgttactatagcattaatgtcgtacaaaggtatcaatcaagaggatggaattatcatcaaaaaacaatttattcagagaggcggtctcgatatagttaccgcaaagaaacatcaagtagaaattccgttggaaaactttaataacaaagaaagagataggtctaatgcatattcgaaattagaaagtaatggattagttagactgaatgctttcttggaatccggagacgctatggcacgaaatatctcatcaagaactcttgaagatgattttgctagagataatcagattagcttcgatgtttccgagaaatataccgatatgtacaaatctcgcgttgaacgagtacaagtagaacttactgacaaagttaaggtacgagtattaaccatgaaagaaagaagacccattctaggagacaaatttaccactagaacgagtcaaaagggaacagtcgcgtatgtcgcggatgaaacggaacttccatacgatgaaaatggtatcacaccagatgtcattattaattctacatccatcttctctagaaaaactatatctatgttgatagaggttattttaacagccgcatattctgctaagccgtacaacaataagggagaaaaccgacctgtctgttttcctagtagtaacgaaacatccatcgatacatatatgcaattcgctaaacaatgttatgagcattcaaatccgaaattgtctgatgaagaattatcggataaaatcttttgtgaaaagattctctatgatcctgaaacggataagccttatgcatccaaagtattttttggaccaatttattacttgcgtctgaggcatttaactcaggacaaggcaaccgttagatgtagaggtaaaaagacgaagctcattagacaagcgaatgagggacgaaaacgtggaggaggtattaagtttggagaaatggagagagactgtttaatagcgcatggcgcagccaatactattacagaagttttgaaagattcggaagaagattatcaagatgtgtatgtttgtgaaaattgtggagacatagcagcacaaatcaagggtattaatacatgtcttagatgttcaaaacttaatctctctcctctcttaacaaaaattgataccacgcacgtatctaaagtatttcttactcaaatgaacgccagaggcgtaaaagtcaaattagatttcgaacgaaggcctccttcgttttataaaccattagataaagttgatctcaagccgtcttttctggtgtaatattctagtttggtagtagatacatatcaatatcatcaaattcgagatccgaattataaaatgggcgtggattgttaactatagaatcggacgtctgatattcgaaaatctgtggagtttcaggttttggtggaggtgtaactgctacttgggatactgaagtctgatattcagaaagctgggggatgttctggttcgacatccaccgatggtgtcacatcactaatcggttcggtaacgtctgtggatggaggtgctacttctacagaacctgtagcctcagttgtcaacggagatacatttttaatgcgaggaaatgtataatttggtaatggtttctcatgtggatctgaagaagaggtaagatatctactagaaagataccgatcacgttctagttctcttttgtagaacttaactttttctttctcagcatctagttgatattccaacctcttcacgttactacgttcagatttcaattcacgttcgcatgggttacctccgcagtttttacgagcgatttcacgttcagccttcatgcgtctctgtgatccgtttacgttaaaccataaatacatgggtgatcctataaacatgaatttatttctaattctcagagctatagttaattgaccgtgtaatatttgcttacatgcatacttgatacgctcattaataagatttttatcattgctcgttatctcagaatcgtatatataaggagtaccatcgtgattcttaccagatattatacaaaatactatatataaaatatattgaccaacgttagtaatcatataaatgtttaacgttttaaattttgtattcaatgatccattatcatacgctagcatggtcttatgatattcattctttaaaatataatattgtgttagccattgcattggagctcctaatggagattttctattctcgtccattttaggatatgctttcataaagtccctaataacttcgtgaataatgtttctatgttttctactgatgcatgtatttgcttcgatttttttatcccatgtttcatctatcatagatttaaacgcagtaatgctcgcaacattaacatcttgaaccgttggtacaattccgttccataaatttataatgttcgccatttatataactcattttttgaatatacttttaattaacaaaagagttaagttactcatatggacgccgtccagtctgaacatcaatctttttagccagagatatcatagccgctcttagagtttcagcgtgattttccaacctaaatagaacttcatcgttgcgtttacaacacttttctatttgttcaaactttgttgttacattagtaatctttttttccaaattagttagccgttgtttgagagtttcctcattgtcgtcttcatcggctttaacaattgcttcgcgtttagcctctggctttttatcagcctttgtagaaaaaaattcagttgctggaattgcaagatcgtcatctccggggaaaagagttccgtccatttaaagtacagattttagaaactgacactctgcgttatttatatttggtacaacacatggattataaatattgatgttaataacatcagaaaatgtaaagtctatacattgttgcatcgtgttaaattttctaatggatctagtattattgggtccaacttctgcctgaaatccaaatatggaagcggatacaaaaccgtttcctggataaaccacacatctccacttttgctttacatcagaaattgtgtcgttgacatcttgaactctcctatctaatgccggtgttccacctatagattttgaatattcgaatgctgcatgagtagcattaaattccttaatattgccataattttcatatattgagtaaccctggataaaaagtaaacacaccgcagccgtcgctaccacaataaaaaaaattgatagagagttcatttataatctattagaagctgacaaaatttttttacacgcatcagacaatgctttaataaatagttcaacatctacttttgtcatatcgaaccgatggtatgattctaacctagaattacatccgaaaaagttgactatgttcatagtcattaagtcattaacaaacaacattccagactctggattataagacgatactgtttcgtcacaatcacctaccttaatcatgtgattatgaatattggctattagagcaccttctaagaaatctataatatctttgaaacacgatttaaaatcaaaccacgaatatacttctacgaagaaagttagtttacccataggagagataactataaatggagatctaaatacaaaatccggatctatgatagttttaacattattatattctctattaaatacctccacatctaaaaatgttaattttgaaactatgtcttcgtttattaccgtacctgaactaaacgctataagctctattgtttgagaactctttaaacgatattcttgaaatacatgtaacaaagtttcctttaactcggtcggtttatctaccatagttacagaatttgtatccttatctataatataataatcaaaatcgtataaagttatataattatcgcgttcagattgggatcttttcaaatagactaaaaaccccatttctctagtaagtatcttatgtatatgtttgtaaaatatcttcatggtgggaatatgctctaccgcagttagccattcctcattgacagcggtagatgtattagacaaaactattccaatgtttaacaagggccattttacgagattattaaatccttgtttgataaatgtagccaatgagggttcgagttcaacgacgattgaattctcttcccgcggatgctgcatgatgaacgacgggatgttgttcgattgatttggaattctttttcgactttttgtttatattaaatattttaaaatttatagctgatagcaattcatgtaccacggataatgtagacgcgtattgcgcatcgatatctttattattagataaatttatcaataaatgtgagaagtttgcctcgttaaggtcttccatttaaatattatataaacatttgtgtttgtatcttattcgtcttttatggaatagttttttactagtaaagctgcaattacacactttgtccgtaaaacataaatataaacaccagcttttatcaatcgttccaaaaagtcgacggcggacatttttaacatggcatctattttaaatacacttaggtttttggaaaaaacatcattttataattgtaacgattcaataactaaagaaaagattaagattaaacataagggaatgtcatttgtattttataagccaaagcattctaccgttgttaaatacttgtctggaggaggtatatatcatgatgatttggttgtattggggaaggtaacaattaatgatctaaagatgatgctattttacatggatttatcatatcatggagtgacaagtagtggagtaatttacaaattgggatcgtctatcgatagactttctctaaataggactattgttacaaaagttaataattatgatgatacattttttgacgacgatgattgatcgctattgcacaattttgtttttttactttctaatatagcgtttagattctttttcatgtgcgaatattgatttactaaaatatcgatgtttaacttttgttctatgacgtccttatcggcggtatcggtacatatacgtaattcaccttcacaaaatacggagtcttcgataataatagccaatcgattattggatctagctgtctgtatcatattcaacatgtttaatatatcctttcgtttcccctttacaggcatcgatcgtagcatattttccgcgtctgagatggaaatgttaaaactacaaaaatgcgtaatgttagcccgtcctaatattggtacgtgtctataagtttggcatagtagaataatagacgtgtttaaatgccttccaaagtttaagaattctattagagtattgcattttgatagtttatcgcctacatcatcaaaaataagtaaaaagtgtgctgattttttatgattttgtgcgacagcaatacatttttctatgttacttttagttcgtatcagattatattctagagattcctgactactaacgaaattaatatgatttggccaaatgtatccatcataatctgggttataaacgggtgtaaacaagaatatatgtttatattttttaactagtgtagaaaacagagatagtaaatagatagtttttccagatccagatcctcccgttaaaaccattctaaacggcatttttaataaattttctcttgaaaattgtttttcttggaaacaattcataattatatttacagttactaaattaatttgataataaatcaaaatatggaaaactaaggtcgttagtagggaggagaacaaagaaggcatatcgtgatataaataacatttattatcatgatgacaccagaaaacgacgaagagcagacatctgtgttctccgctactgtttacggagacaaaattcaaggaaagaataaacgcaaacgcgtgattggtctatgtattagaatatctatggttatttcactactatctatgattaccatgtccgcgtttctcatagtgcgcctaaatcaatgcatgtctgctaacgaggctgctattactgacgccgctgttgccgttgctgctgcatcatctactcatagaaaggttgcgtctagcactacgcaatatgatcacaaagaaagctgtaatggtttatattaccagggttcttgttatatattacattcagactaccagttattctcggatgctaaagcaaattgcactgcggaatcatcaacactacccaataaatccgatgtcttgattacctggctcattgattatgttgaggatacatggggatctgatggtaatccaattacaaaaactacatccgattatcaagattctgatgtatcacaagaagttagaaagtatttttgtgttaaaacaatgaactaatatttatttttgtacattaataaatgaaatcgcttaatagacaaactgtaagtatgtttaagaagttgtcggtgccggccgctataatgatgatactctcaaccattattagtggcataggaacatttctgcattacaaagaagaactgatgcctagtgcttgcgccaatggatggatacaatacgataaacattgttatctagataccaacattaaaatgtccacagataatgcggtttatcagtgtcgtaaattacgagctagattgcctagacctgatactagacatctgagagtattgtttagtattttttataaagattattgggtaagtttaaaaaagaccaataataaatggttagatattaataatgataaagatatagatattagtaaattaacaaattttaaacaactaaacagtacgacggatgctgaagcgtgttatatatacaagtctggaaaactggttaaaacagtatgtaaaagtactcaatctgtactatgtgttaaaaaattctacaagtgacaacaaaaaatgaattaataataagtcgttaacgtacgccgccatggacgccgcgtttgttattactccaatgggtgtgttgactataacagatacattgtatgatgatctcgatatttcaatcatggactttataggaccatacattataggtaacataaaaactgtccaaatagatgtacgggatataaaatattccgacatgcaaaaatgctactttagctataagggtaaaatagttcctcaggattctaatgatttggctagattcaacatttatagcatttgtgccgcatacagatcaaaaaataccatcatcatagcatgcgactatgatatcatgttagatatagaagataaacatcagccattttatctattcccatctattgatgtttttaacgctacaatcatagaagcgtataacctgtatacagctggagattatcatctaatcatcaatccttcagataatctgaaaatgaaattgtcgtttaattcttcattctgcatatcagacggcaatggatggattataattgatgggaaatgcaatagtaattttttatcataaaagttgtaaagtaaataataaaacaataaatattgaactagtagtacgtatattgagcaatcagaaatgatgctggtacctcttatcacggtgacagtagttgcgggaacaatattagtatgttatatattatatatttgtaggaaaaagatacgtactgtctataatgacaataaaattatcatgacaaaattaaaaaagataaagagttctaattccagcaaatctagtaaatcaactgatagcgaatcagactgggaggatcactgtagtgctatggaacaaaacaatgacgtagataatatttctaggaatgagatattggacgatgatagcttcgctggtagtttaatatgggataacgaatccaatgttatggcgcctagcacagaacacatttacgatagtgttgctggaagcacgctgctaataaataatgatcgtaatgaacagactatttatcagaacactacagtagtaattaatgaaacggagactgttgaagtacttaatgaagataccaaacagaatcctaactattcatccaatcctttcgtaaattataataaaaccagtatttgtagcaagtcaaatccgtttattacagaacttaacaataaatttagtgagaataatccgtttagacgagcacatagcgatgattatcttaataagcaagaacaagatcatgaacacgatgatatagaatcatcggtcgtatcattggtgtgattagtttcctttttataaaattgaagtaatatttagtattattgctgccgtcacgttgtacaaatggagatattccctgtattcggcatttctaaaattagcaattttattgctaataatgactgtagatattatatagatacagaacatcaaaaaattatatctgatgagatcaatagacagatggatgaaacggtacttcttaccaacatcttaagcgtagaagttgtaaatgacaatgagatgtaccatcttattccccatagactatcgactattatactctgtattagttctgtcggaggatgtgttatctctatagataatgacgtcaatggcaaaaatattctaacctttcccattgatcatgctgtaatcatatccccactgagtaaatgtgtcgtagttagcaagggtcctacaaccatattggttgttaaagcggatatacctagcaaacgattggtaacatcgtttacaaacgacatactgtatgtaaacaatctatcactgattaattatttgccgttgtctgtattcattattagacgagttaccgactatttggatagacacatatgcgatcagatatttgcgaataataagtggtattccattataaccatcgacaataagcagtttcctattccatcaaactgtataggtatgtcctctgccaagtacataaattctagcatcgagcaagatactttaatacatgtttgtaacctcgagcatccattcgacttagtatacaaaaaaatgcagtcgtacaattctgtacctatcaaggaacaaatattgtacggtagaattgataatataaatatgagcattagtatttctgtgtattaatagatttctagtatggggatcattaatcatctctaatctctaaatacctcataaaacgaaaaaaaagctattatcaaatactgtacggaatggattcattctcttctctttttatgaaactctgttgtatatctactgataaaactggaagcaaaaaatctgatagaaagaataagaataagatcaagatcaaggattatatggaacacgattattataaaataacaatagttcctggttcctcttccacgtctactagctcgtggtattatactcatgcctagtaatagtctctttgcgttgacggaaagcagactagaaataacaggctaaaatgttcagacaccataatagttcccaacccagataataacagagtaccatcaacacattcctttaaactcaatcccaaacccaaaaccgttaaaatgtatccggccaattgatagtagataatgaggtgtacagcgcatgataatttacacagtaaccaaaatgaaaatactttagtaattataagaaatatagatggtaacgtcatcatcaacaatccaataatatgccggagagtaaacattgacggataaaacaaaaatgctccgcataactctatcatggcaataacacaaccaaatacttgtaagattcctaaattagtagaaaatacaacggatatcgatgtataagtgatctcgagaaataataagaataaagtaatgcccgtaaagataaacatcaacattgtttggtaatcattaaaccaattagtatgaagttgaactaatttcacagtagattttattccagtgttatcctcgcatgtataagtacctggtaagatatctttatattctataatcaatgagacatcactatccgataacgaatgaagtctagcactagtatgccatttacttaatattgtcgtcttggaagttttattataagttaaaatatcatggttatccaatttccatctaatatactttgtcggattatctatagtacacggaataatgatggtatcattacatgctgtatactctatggtctttgtagttgttataacaaccaacgtatagaggtatatcaacgatattctaactcttgacattttttatttatttaaaatgatacctttgttatttattttattctattttgctaacggtattgaatggcataagtttgaaacgagtgaagaaataatttctacttacttattagacgacgtattatacacgggtgttaatggggcggtatacacattttcaaataataaactaaacaaaactggtttaactaataataattatatcacaacatctataaaagtagaggatgcggataaggatacattagtatgcggaaccaataacggaaatcccaaatgttggaaaatagacggttcagacgacccaaaacatagaggtagaggatacgctccttatcaaaatagcaaagtaacgataatcagttacaacgaatgtgtactatctgacataaacatatcaaaagaaggaattaaacgatggagaagatttgacggaccatgtggttatgatttatacacggcggataacgtaattccaaaagatggtttacgaggagcattcgtcgataaagatggtacttatgacaaagtttacattcttttcactgatactatcggctcaaagagaattgtcaaaattccgtatatagcacaaatgtgcctaaacgacgaaggtggtccatcatcattgtctagtcatagatggtcgacgtttctcaaagtcgaattagaatgtgatatcgacggaagaagttatagacaaattattcattctagaactataaaaacagataatgatacgatactatatgtattcttcgatagtccttattccaagtccgcattatgtacctattctatgaataccattaaacaatctttttctacgtcaaaattggaaggatatacaaagcaattgccgtctccagctcctggtatatgtttaccagctggaaaagttgtttcacataccacgtttgaagtcatagaaaaatataatgtactagatgatattataaagcctttatctaaccaacctatcttcgaaggaccgtctggtgttaaatggttcgatataaaggagaaggaaaatgaacatcgggaatatagaatatacttcataaaagaaaattctatatattcgttcgatacaaaatctaaacaaactcgtagctcgcaagtcgatgcgcgactattttcagtaatggtaacttcgaaaccgttatttatagcagatatagggataggagtaggaatgccacaaatgaaaaaaatacttaaaatgtaatcttaatcgagtacaccacacgacaatgaacaaacctaagacagattatgctggttatgcttgctgcgtaatatgcggtctaattgtcggaattatttttacagcgacactattaaaagttgtagaacgtaaattagttcatacaccatcaatagataaaacgataaaagatgcatatattagagaagattgtcctactgactggataagctataataataaatgtatccatttatctactgatcgaaaaacctgggaggaaggacgtaatacatgcaaagctctaaatccaaattcggatctaattaagatagagactccaaacgagttaagttttttaagaagccttagacgaggctattgggtaggagaatccgaaatattaaaccagacaaccccatataattttatagctaaaaatgccacgaagaatggaaatatatttgtagcacaacgaatactcccaaactgcattcgtgttacactatataacaattacactacatttttatcataccactacttcggttagatgttttagaaaaaaataaatatcgccgtaccgttcttgtttttataaaaataacaattaacaattatcaaattttttctttaatattttacgtggttgaccattcttggtggtaaaataatctcttagtgttggaatggaatgctgtttaatgtttccgcactcatcgtatattttgacgtatgcagtcacatcgtttacgcaatagtcagactgtagttctatcatgcttcctacatcagaaggaggaacagttttaaagtctcttggttttaatctattgccattagttttcatgaaatcctttgttttatccacttcacattttaaataaatgtccactatacattcttctgttaattttactagatcgtcatgggtcatagaatttataggttccgtagtccatggatccaaactagcaaacttcgcgtatacggtatcgcgattagtgtatacaccaacagtatgaaaattaagaaaacagtttaatagatcaacagaaatatttaatcctccgtttgatacagatgcgccatatttatggatttcggattcacacgttgtttgtctgaggggttcgtctagcgttgcttctacgtaaacttcgattcccatatattctttattgtcagaatcgcataccgatttatcatcatacactgtttgaaaactaaatggtatacacatcaaaataataaataataacgagtacattctgcaatattgttatcgtaattggaaaaatagtgttcgagtgagttggattatgtgagtattggattgtatattttattttatattttatattttatattttgtaataagaataaaatgctaatgtcaagtttattccaatagatgtcttattaaaaaacatatataataaataacaatggctgaatggcataaaattatcgaggatatctcaaaaaataataagttcgaggatgccgccatcgttgattacaagactacaaagaatgttctagctgctattcctaacagaacatttgccaagattaatccgggtgaaattattcctctcatcactaatcgtaatattctaaaacctcttattggtcagaaatattgtattgtatatactaactctctaatggatgagaacacgtatgctatggagttgcttactgggtacgcccctgtatctccgatcgttatagcgagaactcataccgcacttatatttttgatgggtaagccaacaacatccagacgtgacgtgtatagaacgtgtagagatcacgctacccgtgtacgtgcaactggtaattaaaataaaaagtaatattcatatgtagtgtcaattttaaatgatgatgatgaaatggataatatccatattgacgatgtcaataatgccggtattggcatacagctcatcgatttttagatttcattcagaggatgtggaattatgttatgggcatttgtattttgataggatctataatgtagtaaatataaaatataatccgcatattccatatagatataattttattaatcgcacgttaaccgtagatgaactagacgataatgtcttttttacacatggttattttttaaaacacaaatatggttcacttaatcctagtttgattgtctcattatcaggaaacttaaaatataatgatatacaatgctcagtaaatgtatcgtgtctcattaaaaatttggcaacgagtacatctactatattaacatctaaacataagacttattctctacatcggtccacgtgtattactataataggatacgattctattatatggtataaagatataaatgacaagtataatgacatctatgattttactgcaatatgtatgctaatagcgtctacattgatagtgaccatatacgtgtttaaaaaaataaaaatgaactcttaattatgctatgctattagaaatggataaaatcaaaattacggttgattcaaaaattggtaatgttgttaccatatcgtataacttggaaaagataactattgatgttacaccaaaaaagaaaaggatgtattattagcgcaatcagttgctgtcgaagaggcaaaagatgtcaaggtagaagaaaaaaatattatcgatattgaagatgacgatgatatggatgtagaaagcgcgtaatactatctataaacataagtatataataaatactttttatttacggtactcttgtagtggtgataccctactcgattatttttttaaaaaaaaaatacttattctgattcttctaaccatttccgtgttcgtttgaatgccacatcgacgtcaaagataggggagtagttgaaatctagttctgcattgttggtacgcacctcaaatgtagtgttggatatcttcaacgtatagttgttgagtagtgatggttttctaaatagaattctcttcatatcattcttgcacgcgtacatttttagcatccatcttggaatcctagatccttgttctattcccaatggtttcatcaatagaagattaaacatatcgtacgaacacgatggagagtaatcgtagcaaaagtaagcatttcctttaatcttagatcccggatactggatatattttgcagccaacacgtgcatccatgcagcatttcctacatatacccggctatgtaccgcgttatcatcgactgtacgatacataatgttaccgtgttgcttacattgctcgtaaaagactttcgtcaatttgtctccttctccgtaaattccagtgggtcttaggcaacaagtatacaattttgctccattcatgattacggaattattggctttcataaccagttgctcggccatacgtttactttttgcgtatacatgtcctggtgatatatcataaagggtatgctcatggccgatgaatggatcaccgtgtttattgggtcctattgcttccatgctactagtatagatcaaatacttgattcctaggtccacacaagctgccaatatagtctgtgttccataatagtttactttcatgatttcattatcggtgtattttccaaatacatccactagagcagccgtatgaataatcagatttaccccatctagcgcttctctcaccttatcaaagtcgtttatatcacattgtatatagtttataaccttaactttcgaggttattggttgtggatcttctacaatatctatgactctgatttcttgaacatcatctgcactaattaacagttttactatatacctgcctagaaatccggcaccaccagtaaccgcgtacacggccattgctgccactcataatatcagactacttattctattttactaaataatggctgtttgtataatagaccacgataatatcagaggagttatttactttgaaccagtccatggaaaagataaagttttaggatcagttattggattaaaatccggaacgtatagtttgataattcatcgttacggagatattagtcaaggatgtgattccataggcagtccagaaatatttatcggtaacatctttgtaaacagatatggtgtagcatatgtttatttagatacagatgtaaatatatttacaattattggaaaggcgttatctatttcaaaaaatgatcagagattagcgtgtgaagttattggtatttcttacataaatgaaaagataatacattttcttacaattaacgagaatggcgtttgatatatcagttaatgcgtctaaaacaataaatgcattagtttacttttctactcagcaaaataaattagtcatacgtaatgaagttaatgatacacactacactgtcgaatttgatagggacaaagtagttgacacgtttatttcatataatagacataatgacaccatagagataagaggggtgcttccagaggaaactaatattggttgcgcggttaatacgccggttagtatgacttacttgtataataagtatagttttaaactgattttagcagaatatataagacacagaaatactatatccggcaatatttattcggcattgatgacactagatgatttggctattaaacagtatggagacattgatctattatttaatgagaaacttaaagtagactccgattcgggactatttgactttgtcaactttgtaaaggatatgatatgttgtgattctagaatagtagtagctctatctagtctagtatctaaacattgggaattgacaaataaaaagtataggtgtatggcattagcgaacatatatctgatagtattccaatatctgagctatctagactacgatacaatctatgtaagtatctacgcgggcacactgagagcatagaggatgaatttgattattttgaagacgatgattcgtctacatgttctgccgtaaccgacagggaaacggatgtataattttttttatagcgtgaaggatatgataaaaaatataattgttgtatttatcccattccaatcaccttatatgattctgtaaaaaaattatactgtaacacaataaaggagtcttatagatgtatagaggtcagatactggtttgataaactgtttattccacataagtatgtttgactttatggttagacccgcatactttaacaaatcactgaaaattggagttaggtattgacctctcagaatcagttgccgttctggaacattaaatgtattttttatgatatactccaacgcatttatgtgggcatacaacaagtcattactaatggagtattccaagagttttagttgtctagtatttaacaagagaagagatttcaacagactgtttatgaactcgaatgccgcctcattgtcgcttatattgatgatgtcgaattctcccaatatcatcaccgatgagtagctcatcttgttatcgggatccaagttttctaaagatgtcattaaaccctcgatcatgaatggatttatcatcatcgtttttatgttggacatgagcttagtccgtttgtccacatctatagacgacgatttctgaattatttcatatatccctctctttaactccaggaacttgtcaggatggtctactttaatatgttctcgtctaagagatgaaaatctttggatggttgcacgcgacttttctctaaaggatgacgttgcccaagatcctctcttaaatgaatccatcttatccttggacaagatggacagtctattttccttagatggtttaatatttttgttacccatgatctataaaggtagacctaatcgtctcggatgaccatatatttattttcagttttattatacgcataaattgtaaaaaatatgttaggtttacgaaaatgtctcgtggggcattaatcgtttttgaaggattggacaaatctggaaaaacaacacaatgtatgaacatcatggaatctataccggcaaacacgataaaatatcttaactttcctcagagatccactgtcactggaaagatgatagatgactatctaactcgtaaaaaaacctataatgatcatatagttaatctattattttgtgcaaatagatgggagtttgcatcttttatacaagaacaactagaacagggaattactttaatagttgatagatacgcattttctggagtagcgtatgccgccgctaaaggcgcgtcaatgactctcagtaagagttatgaatctggattgcctaaacccgacttagttatattcttggaatctggtagcaaagaaattaatagaaacgtcggcgaggaaatttatgaagatgttacattccaacaaaaggtattacaagaatataaaaaaatgattgaagaaggagatattcattggcaaattatttcttctgaattcgaggaagatgtaaagaaggagttgattaagaatatagttatagaggctatacacacggttactggaccagtggggcaactgtggatgtaatagtgaaattacattttttataaatagatgttagtacagtgttataaatggatgaagcatattactctggcaacttggaatcagtactcggatacgtgtccgatatgcataccgaactcgcatcaatatctcaattagttattgccaagatagaaactatagataatgatatattaaacaaggacattgtaaattttatcatgtgtagatcaaacttggataatccatttatctctttcctagatactgtatatactattatagatcaagagaactatcagactgagttgattaattcattagacgacaatgaaattatcgattgtatagttaataagtttatgagcttttataaggataacctagaaaatatagtagatgctatcatcactctaaaatatataatgaataatccagattttaaaactacgtatgccgaagtactcggttccagaatagccgatatagatattaaacaagtgatacgtaagaatatactacaattgtctaatgatatccgcgaacgatatttgtgaaaaatattaaaaaaaaatactttttttattaaatgacgtcgcttcgcgaatttagaaaattatgctgtgatatatatcacgcatcaggatataaagaaaaatctaaattaattagagactttataacagatagggatgataaatatttgatcattaagctattgcttcccggattagacgatagaatttataacatgaacgataaacaaattataaaattatatagtataatatttaaacaatctcaggaagatatgctacaagatttaggatacggatatataggagacactattaggactttcttcaaagaaaacacagaaatccgtccaagagataaaagcattttaactttagaagacgtggatagtttcttaactacgttatcatccgtaactaaagaatcgcatcaaataaaattattgactgatatcgcatccgtttgtacatgtaatgatttaaaatgtgtagtcatgcttattgataaagatctaaaaattaaagcgggtcctcggtacgtacttaacgctattagtcctaatgcctatgatgtgtttagaaaatctaataacttgaaagagataatagaaaattcatctaaacaaaatctagactctatatctatttctgttatgactccaattaatcccatgttagcggaatcgtgtgattctgtcaataaggcgtttaaaaaatttccatcaggaatgtttgcggaagtcaaatacgatggtgaaagagtacaagttcataaaaataataacgagtttgccttctttagtagaaacatgaaaccagtactctctcataaagtggattatctcaaagaatacataccgaaagcatttaaaaaagctacgtctatcgtattggattctgaaattgttcttgtagacgaacataatgtaccgctcccgtttggaagtttaggtatacacaaaaagaaagaatataaaaactctaacatgtgtttgttcgtgtttgactgtttgtactttgatggattcgatatgacggacattccattgtacgaacgaagatcttttctcaaagatgttatggttgaaatacccaatagaatagtattctcagagttgacgaatattagtaacgagtctcagttaactgacgtattggatgatgcactaacgagaaaattagaaggattggtcttaaaagatattaatggagtatacgaaccgggaaagagaagatggttaaaaataaagcgagactatttgaacgagggttccatggcagattctgccgatttagtagtactaggtgcctactatggtaaaggagcaaagggtggtatcatggcagtctttctaatgggttgttacgacgatgaatccggtaaatggaagacggtaactaaatgttccggtcacgatgataatacgttaagggttttgcaagaccaattaacgatgattaaaattaacaaggatcccaaaaaaattccagagtggttagtagttaataaaatctatattcccgattttgtagtagaggatccgaaacaatctcagatatgggaaatttcaggagcagagtttacatcttccaagtcccataccgcaaatggaatatccattagatttcctagatttactaggataagagaggataaaacgtggaaagaatctactcatctaaacgatttagtaaacttgactaaatcttaatagttacatacaaactgaaaattaaaataacaccatttagttggtggtcgccatggatggtgttattgtatactgtctaaacgcgttagtaaaacatggcgaggaaataaatcatataaaaaatgatttcatgattaaaccatgttgtgaaagagtttgtgaaaaagttaagaacgttcacattggcggacaatctaaaaacaatacagtgattgcagatttgccatatatggataatgctgtatcggatgtatgcaattcactgtataaaaagaatgtatcaagaatatccagatttgctaatttgataaagatagatgacgatgacaagactcctactggtgtatataattattttaaacctaaagatgttattcctgttatcatatctataggaaaggataaagatgtctgtgaactattaatctcatcagacatatcgtgtgcatgcgtggagttaaattcatataaagtagccattcttcccatggatgtttccttttttaccaaaggaaatgcatcattgattattctcctgtttgatttctctatcgatgcagcacctctcttaagaagtgtaaccgataataatgttattatatctagacaccagcgtctacatgacgagcttccgagttccaattggttcaagttttacataagtataaagtccgactattgttctatattatatatggttgttgatggatctgtgatgcatgcgatagctgataatagaactcacgcaattattagcaaaaatatattagacaatactacgattaacgatgagtgtagatgctgttattttgaaccacagattaggattcttgatagagatgagatgctcaatggatcatcgtgtgatatgaacagacattgtattatgatgaatttacctgatgtaggcgaatttggatctagtatgttggggaaatatgaacctgacatgattaagattgctctttcggtggctggtaatttaataagaaatcgagactacattcccgggagacgaggatatagctactacgtttacggtatagcctctagataatttttttaagcacgaaataaaaaacataattttaaaccaatctatttcatactattttgtgtgatcaccatggacataaagatagatattagtatttctggtgataaatttacggtgactactaggagggaaaatgaagaaagaaaaaaatatctacctctccaaaaagaaaaaactactgatgttatcaaacctgattatcttgagtacgatgacttgttagatagagatgagatgtctactattctagaggaatattttatgtacagaggtctattaggcctcagaataaaatatggacgactctttaacgaaattaaaaaattcgacaatgatgcggaagaacaattcggtactatagaagaactcaagcagaaacttagattaaattctgaagagggagcagataactttatagattatataaaggtacaaaaacaggatatcgtcaaacttactgtatacgattgcatatctatgataggattgtgtgcatgcgtggtagatgtttggagaaatgagaaactgttttctagatggaaatattgtttacgagctattaaactgtttattaatgatcacatgcttgataagataaaatctatactgcagaatagactagtatatgtggaaatgtcatagaaagttaaaagttaatgagagcaaaaatatataaggttgtattccatatttgttattttttctgtaatagttaaaaaaatacattcgatggtctatctatcagattattatgtgttataaggtactttttctcataataaactagagtatgagtaagatagtgtttttcaaaacatataaatctaaaattgatggatgagatatacagctattaatttcgaaaatatattttaatctgataactttaaacatggatttttgatggtggtttaacgttttaaaaaaagattttgttattgtagtatatgataatattaaaagatggatataaagaatttgctgactgcatgtactattttttacattactacattggctacggcagatatacctactccgccaccaacgggtcatgtgacaagggagaatatcttgataagaggcataatcaatgttgtaatcggtgtccacctggagaatttgccaaggttagatgtaatggtaacgataacacaaaatgtgaacgctgcccacctcatacatataccacaatcccaattattctaatggatgtcatcaatgtagaaaatgcccaacaggatcatttgataaggtaaagtgtaccggaacacagaacagtaaatgttcgtgtcttcctggttggtattgcgctactgattcttcacagactgaagattgttgaaattgtataccaaaaaggagatgtccatgcggatactttggtggaatagatgaacaaggaaatcctatttgtaaatcgtgttgtgttggtgaatattgcgactacctacgtaattatagacttgatccatttcctccatgcaaactatctaaatgtaattaattatgattttgatgataatgttaccatacattatatcgctacttggttagtgtattattcagtatgaagacctattaataattacttatcttttgacgatcttgttataattataatataaaaatacttatggcatagtaactcataattgctgacgcgataaattcgtaataatctgttttgttcaaaggaatctacaggcataaaaataaaaatataatttataatatactcttacaacgccatcatgaataacagcagtgaattgattgctgttattaatggatttagaaatagtggacgattttgtgatattaatatagttattaatgatgaaaggataaacgctcataaactcatcctatctggagcctccgaatatttttccattctgttttccaataattttatcgattctaatgaatacgaagttaatctaagtcatttagattatcaaagtgttaacgatttgatcgattacatttatgggatacctttgagcctaactaacgataacgtgaaatatattctttcaaccgctgattttttacaaattggatctgccattacggagtgtgaaaattacatacttaaaaatctttgttctaaaaactgtatcgatttctacatatacgctgataaatataataacaagaaaatagaatcagcgtcgtttaacacaatattacaaaatattttgagactcatcaacgatgaaaactttaaatacttaacagaggaatcaatgataaaaattttaagcgatgatatgttaaatataaaaaatgaggatttcgccccactaattctcattaaatggttagagagtactcaacaatcatgcaccgtcgagttacttaaatgcctcagaatatcattgctttccccacaagttataaaatcactttatagtcatcgactggttagttcaatctacgaatgtataacattcttaaacaatatagcattcttggatgaatcatttcctagataccatagcatcgagttgatatctatcggtataagtaattcgcgtgataaaatttccataaactgctacaatcataaaaaaaatacatgggaaatgatatcttcacgtagatataggtgtagtttcgcagtggccgtcctggataatattatttatatgatgggtggatatgatcagtccccgtatagaagttcaaaggttatagcgtacaatacatgtacaaattcttggatatatgatataccagagctaaaatatcctcgttctaattgtgggggactggctgatgacgaatacatttattgtataggcggcatacgcgatcaggattcatcgttgacatctagtattgataaatggaagccatcaaaaccatattggcagaagtatgctaaaatgcgcgaaccaaaatgtgatatgggggttgcgatgttaaacggattaatatatgttataggtggaatcgttaaaggtgacacgtgtaccgacgcactagagagtttatcagaagatggatggatgaagcatcaacgtcttccaataaaaatgtccaatatgtcgacgattgttcatgatggcaagatttatatatctggaggttacaacaatagtagtgtagttaatgtaatatcgaatctagtccttagctataatccgatatatgatgaatggaccaaattatcatcattaaacattcctagaattaatcccgctctatggtcagcgcataataaattatatgtaggaggaggaatatctgatgatgttcgaactaatacatctgaaacatacgataaagaaaaagattgttggacattggataatggtcacgtgttaccacgcaattatataatgtataaatgcgaaccgattaaacataaatatccattggaaaaaacacagtacacgaatgattttctaaagtatttggaaagttttataggtagttgatagaacaaaatacataattttgtaaaaataaatcactttttatactaatatgacacgattaccaatacttttgttactaatatcattagtatacgctacaccttttcctcagacatctaaaaaaataggtgatgatgcaactctatcatgtaatcgaaataatacaaatgactacgttgttatgagtgcttggtataaggagcccaattccattattcttttagctgctaaaagcgacgtcttgtattttgataattataccaaggataaaatatcttacgactctccatacgatgatctagttacaactatcacaattaaatcattgactgctagagatgccggtacttatgtatgtgcattctttatgacatcgcctacaaatgacactgataaagtagattatgaagaatactccacagagttgattgtaaatacagatagtgaatcgactatagacataatactatctggatctacacattcaccagaaactagttctgagaaacctgattatatagataattctaattgctcgtcggtattcgaaatcgcgactccggaaccaattactgataatgtagaagatcatacagacaccgtcacatacactagtgatagcattaatacagtaagtgcaacatctggagaatccacaacagacgagactccggaaccaattactgataaagaagaagatcatacagtcacagacactgtctcatacactacagtaagtacatcatctggaattgtcactactaaatcaaccaccgatgatgcggatctttatgatacgtacaatgataatgatacagtaccatcaactactgtaggtagtagtacaacctctattagtaattataaaaccaaggactttgtagaaatatttggtattaccgcattaattatattgtcggccgtggcaatattctgtattacgtattatatatgtaataaacgttcacgtaaatacaaaacagagaacaaagtctagatttttgacttacataaatgtctgggatagtaaaatctatcatattgagcggaccatctggttcaggaaagacagccatagccaaaagactatgggaatatatttggatttgtggtgtcccataccactagatttcctcgtcctatggaacgagaaggtgtcgattaccattacgttaacagagaggccatctggaagggaatagccgccggaaactttctagaacatactgagtttttaggaaatatttacggaacttctaaaactgctgtgaatacagcggctattaataatcgtatttgtgtgatggatttaaacatcgacggtgttagaagttttaaaaatacttacctaatgccttactcggtgtatataagacctacctctcttaaaatggttgagaccaagcttcgttgtagaaacactgaagctaacgatgagattcatcgtcgcgtgatattggcaaaaacggatatggatgaggccaacgaagcaggtctattcgacactattattattgaagatgatgtgaatttagcatatagtaagttaattcagatactacaggaccgtattagaatgtattttaacactaattaaagacttaagacttaaaacttgataattaataatataactcgtttttatatgtggctatttcaacgtctaatgtattagttaaatattaaaacttaccacgtaaaacttaaaatttaaaatgatatttcattgacagatagatcacacattatgaactttcaaggacttgtgttaactgacaattgcaaaaatcaatgggtcgttggaccattaataggaaaaggtggatttggtagtatttatactactaatgacaataattatgtagtaaaaatagagcccaaagctaacggatcattatttaccgaacaggcattttatactagagtacttaaaccatccgttatcgaagaatggaaaaaatctcacaatataaagcacgtaggtcttatcacgtgcaaggcatttggtctatacaaatccattaatgtggaatatagattcttggtaattaatagattaggtgtagatctagatgcggtgatcagagccaataataatagattaccaaaaaggtcggtgatgttgatcggaatcgaaatcttaaataccatacaatttatgcacgagcaaggatattctcacggagatattaaagcgagtaatatagtcttggatcaaatagataagaataaattatatctagtggattacggattggtttctaaattcatgtctaatggcgaacatgttccatttataagaaatccaaataaaatggataacggtactctagaatttacacctatagattcgcataaaggatacgttgtatctagacgtggagatctagaaacacttggatattgtatgattagatggttgggaggtatcttgccatggactaagatatctgaaacaaagaattgtgcattagtaagtgccacaaaacagaaatatgttaacaatactgcgactttgttaatgaccagtttgcaatatgcacctagagaattgctgcaatatattaccatggtaaactctttgacatattttgaggaacccaattacgacgagtttcggcacatattaatgcagggtgtatattattaagtgtggtgtttggtcgatgtaaaatttttgtcgataaaaattaaaaaataacttaatttattattgatctcgtgtgtacaaccgaaatcatggcgatgttttacgcacacgctctcggtgggtacgacgagaatcttcatgcctttcctggaatatcatcgactgttgccaatgatgtcaggaaatattctgttgtgtcagtttataataacaagtatgacattgtaaaagacaaatatatgtggtgttacagtcaggtgaacaagagatatattggagcactgctgcctatgtttgagtgcaatgaatatctacaaattggagatccgatccatgatcaagaaggaaatcaaatctctatcatcacatatcgccacaaaaactactatgctctaagcggaatcgggtacgagagtctagacttgtgtttggaaggagtagggattcatcatcacgtacttgaaacaggaaacgctgtatatggaaaagttcaacatgattattctactatcaaagagaaggccaaagaaatgagtacacttagtccaggacctataattgattaccacgtctggataggagattgtatctgtcaagttactgctgtggacgtacatggaaaggaaattatgagaatgagattcaaaaagggtgcggtgcttccgatcccaaatctggtaaaagttaaacttggggagaatgatacagaaaatctttcttctactatatcggcggcaccatcgaggtaaccacctctctggaagacagcgtgaataatgtactcatgaaacgtttggaaactatacgccatatgtggtctgttgtatatgatcattttgatattgtgaatggtaaagaatgctgttatgtgcatacgcattcatctaatcaaaatcctataccgagtactgtaaaaacaaatttgtacatgaagactatgggatcatgcattcaaatggattccatggaagctctagagtatcttagcgaactgaaggaatcaggtggatggagtcccagaccagaaatgcaggaatttgaatatccagatggagtggaagacactgaatcaattgagagattggtagaggagttcttcaatagatcagaacttcaggctggtaaattagtcaaatttggtaattctattaattgttaaacatacatctgtttcagctaagcaactaagaacacgtatacggcagcagcttcctttatactctcatcttttaccaacacaaagggtggatatttgttcattggagttgataataatacacacaaagtatttggattcacggtgggttacgactacctcagactggtagagaatgatatagaaaagcatatcaaaagactttgtgttgtgcatttctgtgagaagaaagaggacatcaagtacgcgtgtcgattcatcaaggtatataaacctggggatgaggctacctcgacatacgtgtgcgctatcaaagtggaaagatgctgttgtgctgtgtttgcagattggccagaatcatggtatatggatactaatggtatcaagaagtattctccagatgaatgggtgtcacatataaaattttaattaatgtaactatagagaacaaataataggttgtaatatcatatagacaataactaacaattaattagtaactgttatctcttttttaactaaccaactaactatatacctattaatacatcgtaattatagttcttaacatctattaatcattgattcgcttctttaattttttataaactaacattgttaattgaaaagggataacatgttacagaatataaattatatatggatttttttaaaaaggaaatacttgactggagtgtatatttatctcttcattatatagcacgcgtgtgttccaattcttccacatcccatataatacaggattataatctcattcgaacatacgagaaagtggataaaacaatagttgattttttatctaggttgccaaatttattccatattttagaatatggggaaaatattctacatatttattctatggatgatgctaatacgaatattataattttttttctagatagagtattaaatattaataagaacgggtcatttatacacaatctcaggttatcatcatccattaatataaaagaatatgtatatcaattagttaataatgatcatccagataataggataagactaatgcttgaaaatggacgtagaacaagacattttttgtcctatatatcagatacagttaatatctatatatgtattttaataaatcatggattttatatagatgccgaagacagttacggttgtacattattacatagatgtatatatcactataagaaatcagaatcagaatcatacaatgaattaattaagatattgttaaataatggatcagatgtagataaaaaagatacgtacggaaacacaccttttatcctattatgtaaacacgatatcaacaacgtggaattgtttgagatatgtttagagaatgctaatatagactctgtagactttaatagatatacacctcttcattatgtctcatgtcgtaataaatatgattttgtaaagttattaatttctaaaggagcaaatgttaatgcgcgtaataaattcggaactactccattttattgtggaattatacacggtatctcgcttataaaactatatttggaatcagacacagagttagaaatagataatgaacatatagttcgtcatttaataatttttgatgctgttgaatctttagattatctattatccagaggagttattgatattaactatcgtactatatacaacgaaacatctatttacgacgctgtcagttataatgcgtataatacgttggtctatctattaaacagaaatggtgattttgagacgattactactagtggatgtacatgtatttcggaagcagtcgcaaacaacaacaaaataataatggaagtactattgtctaaacgaccatctttgaaaattatgatacagtctatgatagcaattactaaaaataaacaacataatgcagatttattgaaaatgtgtataaaatatactgcgtgtatgaccgattatgatactcttatagatgtacagtcgctacagcaatataaatggtatattttaaaatgtttcgatgaaatagatatcatgaagagatgttatataaaaaataaaactgtattccaattagttttttgtatcaaagacattaatactttaatgagatacggtaaacatccttctttcgtgaagtgcactagtctcgacgtatacggaagtcgtgtacgtaatatcatagcatctattagatatcgtcagagattaattagtctattatccaagaagctggatgcgggagataaatggtcgtgttttcctaacgaaataaaatataaaatattggaaaactttaacgataacgaactgtccacatatctaaaaatcttataaacactattaaaatataaaatctaagtaggataaaatcacactacatcattgtttccttttagtgctcgacagtgtatactatttttaacactcataaataaaaatgaaaacgatttccgttgttacgttgttatgcgtactacctgctgttgtttattcaacatgtactgtacccactatgaataacgctaaattaacgtctaccgaaacatcgtttaataataaccagaaagttacgtttacatgtgatcagggatatcattcttcggatccaaatgctgtctgcgaaacagataaatggaaatacgaaaatccatgcaaaaaaatgtgcacagtttctgattacatctctgaactatataataaaccgctatacgaagtgaattccaccatgacactaagttgcaacggcgaaacaaaatattttcgttgcgaagaaaaaaatggaaatacttcttggaatgatactgttacgtgtcctaatgcggaatgtcaacctcttcaattagaacacggatcgtgtcaaccagttaaagaaaaatactcatttggggaatatatgactatcaactgtgatgttggatatgaggttattggtgcttcgtacataagttgtacagctaattcttggaatgttattccatcatgtcaacaaaaatgtgatataccgtctctatctaatggattaatttccggatctacattttctatcggtggcgttatacatcttagttgtaaaagtggttttatactaacgggatctccatcatccacatgtatcgacggtaaatggaatcccgtactcccaatatgtgtacgaactaacgaagaatttgatccagtggatgatggtcccgacgatgagacagatttgagcaaactctcgaaagacgttgtacaatatgaacaagaaatagaatcgttagaagcaacttatcatataatcatagtggcgttaacaattatgggcgtcatatttttaatctccgttatagtattagtttgttcctgtgacaaaaataatgaccaatataagttccataaattgctaccgtaaatataaatccgttaaaataattaataattaataattaataattaataacgaacaagtatcaaaagattaaagacttatagctagaatcaattgagatgtcttcttcagtggatgttgatatctacgatgccgttagagcatttttactcaggcactattataacaagagatttattgtgtatggaagaagtaacgccatattacataatatatacaggctatttacaagatgcgccgttataccgttcgatgatatagtacgtactatgccaaatgaatcacgtgttaaacaatgggtgatggatacacttaatggtataatgatgaatgaacgcgatgtttctgtaagcgttggcaccggaatactattcatggaaatgtttttcgattacaataaaaatagtatcaacaatcaactaatgtatgatataattaatagcgtatctataattctagctaatgagagatatagaagcgcttttaacgacgatggtatatacatccgtagaaatatgattaacaagttgtacggatacgcatctctaactactattggcacgatcgctggaggtgtttgttattatctgttgatgcatctagttagtttgtataaataattatttcaatatactagttaaaattttaagattttaaatgtataaaaaactaataacgtttttatttgtaataggtgcattagcatcctattcgaataatgagtacactccgtttaataaactgagtgtaaaactctatatagatggagtagataatatagaaaattcatatactgatgataataatgaattggtgttaaattttaaagagtacacaatttctattattacagagtcatgcgacgtcggatttgattccatagatatagatgttataaacgactataaaattattgatatgtataccattgactcgtctactattcaacgcagaggtcacacgtgtagaatatctaccaaattatcatgccattatgataagtacccttatattcacaaatatgatggtgatgagcgacaatattctattactgcagagggaaaatgctataaaggaataaaatatgaaataagtatgatcaacgatgatactctattgagaaaacatactcttaaaattggatctacttatatatttgatcgtcatggacatagtaatacatattattcaaaatatgatttttaaaaatttaaaatatattatcacttcagtgacagtagtcaaataacaaacaacaccatgagatatattataattctcgcagttttgttcattaatagtatacacgctaaaataactagttataagtttgaatccgtcaattttgattccaaaattgaatggactggggatggtctatacaatatatcccttaaaaattatggcatcaagacgtggcaaacaatgtatacaaatgtaccagaaggaacatacgacatatccgcatttccaaagaatgatttcgtatctttctgggttaaatttgaacaaggcgattataaagtggaagagtattgtacgggactatgcgtcgaagtaaaaattggaccaccgactgtaacattgactgaatacgacgaccatatcaatttgtacatcgagcatccgtatgctactagaggtagcaaaaagattcctatttacaaacgcggtgacatgtgtgatatctacttgttgtatacggctaacttcacattcggagattctgaagaaccagtaacatatgatatcgatgactacgattgcacgtctacaggttgcagcatagactttgccacaacagaaaaagtgtgcgtgacagcacagggagccacagaagggtttctcgaaaaaattactccatggagttcggaagtatgtctgacacctaaaaagaatgtatatacatgtgcaattagatccaaagaagatgttcccaatttcaaggacaaaatggccagagttatcaagagaaaatttaataaacagtctcaatcttatttaactaaatttctcggtagcacatcaaatgatgttaccacttttcttagcatgcttaacttgactaaatattcataactaatttttattaatgatacaaaaacgaaataaaactgcatattatacactggttaacgcccttataggctctaaccattttcaagatgaggtccctgattatagtccttctgttcccctctatcatctactccatgtctattagacgatgtgagaagactgaagaggaaacatggggattgaaaatagggttgtgtataattgccaaagatttctatcccgaaagaactgattgcagtgttcatctcccaactgcaagtgaaggattgataactgaaggcaatggattcagggatatacgaaacaccgataaattataaaaaaagcaatgtgtccgctgtttccgttaataatactattttcgtaactggcggattattcataaataactctaatagcacgatcgtggttaacaatatggaaaaacttgacatttataaagacaaacaatggtcgattatagaaatgcctatggctagggtatatcacggcatcgactcgacatttggaatgttatattttgccggaggtctatccgttaccgaacaatatggtaatttagagaaaaacaacgagatatcttgttacaatcctagaacgaataagtggtttgatatttcatatactatttataagatatccatatcatcattgtgtaaactaaataacgtcttctatgtatttagtaaggacattggatatgtggaaaagtatgatggtgcatggaagttagtacatgatcgtctccccgctataaaggcattatcaacttctccttattgattgaaaatgaaaatataaatagtttttatgtatagcagtattaccctatagttttattgcttactactaacatggatacagatacagatacagatacagatacagatacagatacagatacagatacagatgttacaaatgtagaagatatcataaatgaaatagatagagagaaagaagaaatactaaaaaatgtagaaattgaaaataataaaaacattaacaagaatcatccaagtggatatattagagaagcactcgttattaatacaagtagtaatagtgattccattgataaagaagttatagaatgtatcagtcacgatgtaggaatatagatcatatctactaatttttataatcaatacaaaacataaaaaacaactcgttattacatagcaggcatggaatccttcaagtattgttttgataacgatggcaagaaatggattatcggaaatactttatattctggtaattcaatactctataaggtcagaaaaaatttcactagttcgttctacaattacgtaatgaagatagatcacaaatcacacaagccattgttgtctgaaatacgattctatatatctgtattggatcctttgactatcgacaactggacacgggaacgtggtataaagtatttggctattccagatctgtatggaattggagaaaccgatgattatatgttcttcgttataaagaatttgggaagagtattcgccccaaaggatactgaatcagtcttcgaagcatgtgtcactatgataaacacgttagagtttatacactctcgaggatttacccatggaaaaatagaaccgaggaatatactgattagaaataaacgtctttcactaattgactattctagaactaacaaactatacaagagtggaaactcacatatagattacaacgaggacatgataacttcaggaaatatcaattatatgtgtgtagacaatcatcttggagcaacagtttcaagacgaggagatttagaaatgttgggatattgcatgatagaatggttcggtggcaaacttccatggaaaaacgaaagtagtataaaagtaataaaacaaaaaaaagaatataaaaaatttatagctactttctttgaggactgttttcctgaaggaaatgaacctctggaattagttagatatatagaattagtatacacgttagattattctcaaactcctaattatgacagactacgtagactgtttatacaagattgaaattatattctttttttatagagtgtggtagtgttacggatatctaatattaatattagactatctctatcgcgctacacgaccaatatcgattactatgaatatcttctatgaaaggagagaatgtattcatttctccagcgtcaatctcgtcagtattgacaatactgtattatggagctaatggatccactgctgaacagctatcaaaatatgtagaaacggaggagaacacggataaggttagcgctcagaatatctcattcaaatccataaataaagtatatgggcgatattctgccgtgtttaaagatttctttttgggaaaaattggcgataagtttcaaactgttgacttcactgattgtcgcactatagatgcaatcaacaagtgtgtagatatctttactgaggggaaaatcaatccactattggatgaaccattgtctcctagcaattagtgccgtatactttaaagcaaaatggttgacgccattcgaaaaggaatttaccagtgattatcccttttacgtatcaccaacggaaatggtagatgtaagtatgatgtctatgtacggcgagctatttaatcacgcatctgtaaaggaatcattcggcaacttttcaatcatagaactgccatatgttggagatactagtatgatggtcattcttccagacaagattgatggattagaatccatagaacaaaatctaacagatacaaattttaagaaatggtgtaactctctggatgctatgtttatagatgttcacattcccaagtttaaggtaacaggctcgtataatctggtggatactctagtaaagtcaggactgacagaggtgttcggttcaactggagattatagcaatatgtgtaatttagatgtgagtgtcgacgctatgatccacaaaacgtatatagatgtcaatgaagagtatacagaagcagctgcagcaacttgtgcactggtgtcagactgtgcatcaacaattacaaatgagttctgtgtagatcatccgttcatctatgtgattaggcatgttgatggaaaaattcttttcgttggtagatattgctctccaacaactaattgttaaccattttttttaaaaaaaatagaaaaaacatgtggtattagtgcaggtcgttgttcttccaattgcaattggtaagatgacagccaactttagtacccacgtcttttcaccacagcactgtggatgtgacagactgaccagtattgatgacgtcaaacaatgtttgactgaatatatttattggtcgtcctatgcataccgcaacaggcaatgcgctggacagttgtattccacactcctctcttttagagatgatgcggaattagtgttcatcgacattcgcgagctggtaaaaaatatgccgtgggatgatgtcaaagattgtacagaaatcatccgttgttatataccggatgagcaaaaaaccatcagagagatttcggccatcatcggactttgtgcatatgctgctacttactggggaggtgaagaccatcccactagtaacagtctgaacgcattgtttgtgatgcttgagatgctcaattacgtggattataacatcatattccggcgtatgaattgatgagttgtacatcttgacattttcttctttcttctcttctccctttcccagaaacaaacttttttacccactataaaataaaatgagtatactacctgttatatttcttcctatatttttttattcttcattcgttcagacttttaacgcgtctgaatgtatcgacaaagggtaatattttgcatcattcatggagttagaaaacgagccagtaatcttaccatgtcctcaaataaatacgctatcatccggatataatatattagatattttatgggaaaaacgaggagcggataatgatagaattataccgatagataatggtagcaatatgctaattctgaacccgacacaatcagactctggtatttatatatgcattaccacgaacgaaacctactgtgacatgatgtcgttaaatttgacaatcgtgtctgtctcagaatcaaatatagattttatctcgtatccacaaatagtaaatgagagatctactggcgaaatggtatgtcccaatattaatgcatttattgctagtaacgtaaacgcagatattatatggagcggacatcgacgccttagaaataagagacttaaacaacggacacctggaattattaccatagaagatgttagaaaaaatgatgctggttattatacatgtgttttagaatatatatacggtggcaaaacatataacgtaaccagaattgtaaaattagaggtacgggataaaataatacatcctactatgcaattaccagaaggtgttgtaacttcaataggtagtaatttgactattgcgtgtagagtatcgttgagacctcccacaacggatgcagacgtcttttggataagtaatggtatgtattacgaagaagatgatggggacggagacggtagaataagtgtagcaaataaaatctatatgaccgataagagacgtgttattacatcccggttaaacattaatcctgtcaaggaagaagatgctacaacgtttacgtgtatggcgtttactattcctagcatcagcaaaacagttactgttagtataacgtgaatgtatgttgttacatttccatgtcaattgagtttataagaatttttatacattatcttccaacaagcaattgacgaacgtattgctatgattaactcccacgatactatgcatattattaatcattaacttgcagactatacctagagctattttgacatactcgtgttcttgtgtaattgcagtatctatattattaaagtacgtaaatctagctatagttttattatttaattttagataatataccgtctccttatttttaaaaattgccacatcctttattaaatcatgaatgggaatttctatgtcatcgttagtatattgtgaacaacaagagcagatatctataggaaagggtggaatgcgatacattgatctatgtagttttaaaacacacgcaaactttgaagaatttatataaatcattccatcgatacatccttctatgttgacatgtatatatccaggaattcttttattaatgtcaggaaatgtataaactaaaacattgcccggaagcggagcttctaccggagttatatccgttcttaacttacaaaatgtaaccaatacctttgcatgacttgttttgttcggcaacgttagtttaaacttgacgaatggattaattacaatagcatgatccgcgcatctattaagtttttttactttaacgcccttgtatgtttttacagagactttatctaaatttctagtacttgtatgtgttataaatataacgggatatagaaccgaatcacctaccttagatacccaattacattttatcagatccagataataaacaaattttgtcgccctaactaattctatattgttatatattttacaattggttatgatatcatgtaataacttggaatctaacgcacatcgtcgtacgtttacacaattgtgatttagtgtagtatatctacacatgtatttttccgcgctatagtattctggactagtgataaaactatcgttatatctgtcttcaatgaactcatcgagatattgctctctgtcatattcatacacctgcataaactttctagacatcttacaatccgtgttattttaggatcatatttacatatttactggtataaagatgttagattagttaatgggaatcgtctataataatgaatattaaacaattatatgaggacttttaccacaaagcatcataaaaatgagtcgtcgtctgatttatgttttaaatatcaaccgcaaatcaactcataaaatacaagagaatgaaatatatacatattttagtcattgcaatatagaccatacttctacagaacttgattttgtagttaaaaactatgatctaaacagacgacaacatgtaactgggtatactgcactacactgctatttgtataataattactttacaaacgatgtactgaagatattattaaatcatgacgtaaatgtaacgatgaaaaccagtagcggacgtatgcctgtttatatattgcttactagatgttgtaatatttcacatgatgtagtgatagatatgatagacaaagataaaaaccacttatcgcatagagactattccaacctactactagagtatataaaatctcgttacatgttattgaaggaagaggatatcgatgagaacatagtatcaactttattagataagggaatcgatcctaactttaaacaagacggatatacagcgttacattattattatttgtgtctcgcacacgtttataaaccaggtgagtgtagaaaaccgataacgataaaaaaggccaagcgaattatttctttgtttatacaacatggagctaatctaaacgcgttagataattgtggtaatacaccattccatttgtatcttagtattgaaatgtgtaataatattcatatgactaaaatgctgttgacttttaatccgaatttcaaaatatgtaataatcatggattaacgcctatactatgttatataacttccgactacatacaacacgatattcttgttatgttaatacatcactatgaaacaaatgttggagaaatgccgatagatgagcgtcgtatgatcgtattcgagtttatcaaaacatattctacacgtcctgcagattcgataacttatttgatgaataggtttaaaaatataaatatttatacccgctatgaaggaaagacattattacacgtagcatgtgaatataataatacacaagtaatagattatcttatacgtatcaacggagatataaatgcgttaaccgacaataacaaacacgctacacaactcattatagataacaaagaaaattccccatataccattaattgtttactgtatatacttagatatattgtagataagaatgtgataagatcgttggtggatcaacttccatctctacctatcttcgatataaaatcatttgagaaattcatatcctactgtatacttttagatgacacattttacgataggcacgttaagaatcgcgattctaaaacgtatcgatacgcattttcaaaatacatgtcgttcgataaatacgatggtataataactaaatgtcacgacgaaacaatgttactcaaactgtccactgttctagacactacactatatgcagttttaagatgtcataattcgagaaagttaagaagatacctcaccgagttaaaaaaatataataacgataagtcctttaaaatatattctaatattatgaatgagagataccttaatgtatattataaagatatgtacgtgtcaaaggtatatgataaactatttcctgttttcacagataaaaattgtctactaacattactaccttcagaaattatatacgaaatattatacatgctgacaattaacgatctttataatatatcgtatccacctaccaaagtatagttgtatttttctcatgcgatgtgtgtaaaaaaactgatattatataaatattttagtgccgtataataaagatgacgatgaaaatgatggtacatatatatttcgtatcattatcattattgttattgctattccacagttacgccatagacatcgaaaatgaaatcacagaattcttcaataaaatgagagatactctaccagctaaagactctaaatggttgaatccagcatgtatgttcggaggcacaatgaatgatatggccactctaggagagccattcagtgcaaagtgtcctcctattgaagacagtcttttatcgcacagatataaagactatgtggttaaatgggagaggctagaaaagaatagacggcgacaggtttctaataaacgtgttaaacatggtgatttatggatagccaactatacatctaaattcagtaaccgtaggtatttgtgcaccgtaactacaaagaatggtgactgtgttcagggtatagttagatctcatattaaaaaacctccttcatgcattccaaaaacatatgaactaggtactcatgataagtatggcatagacttatactgtggaattctttacgcaaaacattataataatataacttggtataaagataataaggaaattaatatcgacgacattaagtattcacaaacgggaaaggaattaattattcataatccagagttagaagatagcggaagatacgactgttacgttcattacgacgacgttagaatcaagaatgatatcgtagtatcaagatgtaaaatacttacggttataccgtcacaagaccacaggtttaaactaatactagatccgaaaatcaacgtaacgataggagaacctgccaatataacatgcactgctgtgtcaacgtcattattgattgacgatgtactgattgaatgggaaaatccatccggatggcttataggattcgattttgatgtatactctgttttaactagtagaggcggtatcaccgaggcgaccttgtactttgaaaatgttactgaagaatatataggtaatacatataaatgtcgtggacacaactattattttgaaaaaacccttacaactacagtagtattggagtaaatatacaatgcatttttatatacattactgaattattattactgaattattattactgaattattattaattatatcgtatttgtgctatagaatggatgaagatacgcgactatctaggtatttgtatctcaccgatagagaacatataaatgtagactctattaaacagttgtgtaaaatatcagatcctaatgcatgttatagatgtggatgtacggctttacatgagtacttttataattatagatcagtcaacggaaaatacaagtatagatacaacggttactatcaatattattcatctagcgattatgaaaattataatgaatattattatgatgattatgatagaactggtatgaacagcgagagcgatagtgagagtgataatatatcaatcaaaacagaatatgagaatgaatatgaattctatgatgaaacacaagatcaaagtacacaacacaatgacttataaaaatactaaaactggagagactgattacacgtacctctctaatgggggttgcctgcatactatcgtaatggggtcgatggttgattattgattagtatattccttattcacacaaaaagaacatttttataaacatgaaaccactgtctaaatgtaattatgatcttgatttatagatgaagatcagcctttagaggattttaaccagtatgtttaatatgaaaaaaataaacataacatattttgagattaagcgctattgtgcttaattattttgctctataaactgaatatatagccacaattattgacgggcttgtttatgaccggcaatcatgaatttacagaaattatctctggctatatatcttactgcgacatgttcgtggtgttatgaaacatgcataagaaaaactgcgttgtatcatgacattcaattggagcatgtagaagacaataaagatagtgtagcgtcgctaccgtacaagtagtcaatcaaagagaacgtagtagattgttggctacatttaattggacagatatagctgagggtgttagaaatgagttcattaaaatatgtgatatcaacggaacatatttatataattatactattgctgttagtataattattgattccacggaagaactaccaacagttactccaattacaacaacatatgaaccttctacatataattatactatcgatgatagcactgttattactactgaagaactacaagtgactcctcatatggatctccatcgatgatacatgtattaaaatactttccgaataagtcttttaaatattgtattaattatgaaaaactatgctatgcgagtatgatgcaaagatgtttaatgatacgatactagattttatctctagcgagagatgtcgttagaatcatttatcataactacgtttaataataattcatcaacgaatatcgataacatgtgtcatttatacgttaaagtctgtccgtcttctctattgtttagactgtttgtagaatgctgtgatataaacaaactagtagaaggtacgactccgttacactgttatctaatgaatgaaggatttgaatcatctgttttaaaaaacctattaaaggagtatgtcatgaatacgtttaatgttcatgacatccattacacaaatatttaactcatgatgaagttgagaatgatatgctttctgatagtatagatagctttagctaatataaaaatatattaatccactatatattctagacttgatttaaaaccgataaactactactacgtactgtataagttgttaaaaaaaggagcagaccctaattatgtagatgatagaggtaatacttttcttcattacttctgcatctatatgtccacttatgagaaaacgtcattcaataagatgcatcgtgaaaagaaatttattaaagagttggtaaaatatgaaaccgaaagtaaataatataggaaatacacctctacataactacgtatctcaatatgatatcactctcattcctcatccacaacccattaaaaaaatggaaattaaagccctctattagcataaacggctacaggtctacctttacaatggcctttccttgtgcccagttcagaccctgtcattgccacgctactaaggactccctgaataccgtggccgacgtcagacattgtctgactgaatacatcctgtgggtttctcatagatggacccatagagaaagcgcagggtctctctacaggcttctcatctctttcagaactgatgcaacggagctctttggtggtgagttgaaggattcacttccgtgggacaatatcgacaattgcgtggagatcattaaatgtttcatcagaaatgactccatgaaaaccgccgaagaacttcgtgcaatcattggactttgtactcaatcagctatcgtctctggaagagtcttcaacgataagtatatcgacatactacttatgctgcgaaagattctgaacgagaacgactatctcaccctcttggatcatatccgcactgctaaatactaaatctccttcatgctctctcactacactttttatcatcttatgaggaatgattgccttcatcatttttcgtgaaataggaataattagcaccagaatagctatggattattgtggtagagagtgcactattctatgtcgtctactggatgaagatgtgacgtacaaaaaaataaaactagagattgaaacgtgtcacaacttatcaaaacatatagatagacgaggaaacaatgcgctacattgttacgtctccaataaatgcgatacagacattaagattgttcgactgttactctctcgcggagtcgagagactttgtagaaacaacgaaggattaactccgctaggagcatacagtaagcatagatacgtaaaatctcagattgtgcatctactgatatccagctattcgaattcctctaacgaactcaagtcgaatataaatgatttcgatctgtcttcggataatatcgacttacgtctgctaaaatacctaattgtggataaacggatacgtccgtccaagaatacgaattatgcaatcaatggtctcggattggtggatatatacgtaacgacgcctaatccgagaccagaagtattgctatggcttcttaaatcagaatgttacagcaccggttacgtatttcgtacctgtatgtacaacagtgatatgtgtaagaactctcttcattactatatatcgtctcatagagaatctcaatctctatccaaggatgtaattaaatgtttgatcaataacaatgtttccatccatggcagagacgaaggaggatctttacccatccaatactactggtctttctcaaccatagatatagagattgttaaattattattaataaaggatgtggacacgtgtagagtatacgacgtcagccctatattagaggcgtattatctaaacaagcgatttagagtaaccccatataatgtagacatggaaatcgttaatcttcttattgagagacgtcatactcttgtcgacgtaatgcgtagtattacttcgtacgattccagagaatataaccactacatcatcgataacattctaaagagatttagacaacaggatgaatccatcgtacaagccatgttgataaactacttacattacggcgatatggtcgttcgatgcatgttagataacggacaacaactatcctctgcacgactactttgttaataataatctcgtcgatgtaaacgtcgtaaggtttatcgtggaaaatatggacacgcggctgtaaatcacatatctaacaatggccgtctatgtatgtacggtctgatattatcgagatttaataattgcgggtatcactgttatgaaaccatactaatagatgtatttgatatactaagcaagtacatggatgatatagatatgatcgataatgagaataaaactctactatattacgcggtcgatgtcaataatatacaatttgcaaagcggttattggaatatggagcgagtgttacaacatcacgctcgataatcaatacggccatccagaaaagcagttaccaaagagaaaacaaaacgaggatagttgatttattacttagctaccatcccactctagagactatgattgacgcatttaatagagatatacgctatctatatcctgaaccattattcgcctgtatcagatacgccttaatcctagatgatgattttccttctaaagtaagtatgatatcgccggtcatcataaggaactaaagcgctatagagtagacattaatagaatgaagaatgcctacatatcaggcgtctccatgtttgatatattatttaaacgaagcaaacgccacagactgagatacgcaaagaatccgacatcaaatggtacaaaaaagaactaacgtccatcattacagaaactgtaaagaacagtgagaggatcgactccatagtggacaacattaatacagacgataacttgatttcgaaattacccatggagatactttattactccattaaataatttatcatggagtgataatgtcctgtttcatttgtttccatgacatattacaaaatcgattccgtccaagatgataaaaacatttaccggcatcataaacacggagtttattttatatgtctcgcataaacattactaaaaaaatatattgttctgtttttctttttctttttctttttctttcgtacatctctaattatgaaaaagtaaatgatgaaatgtatgagatgggcgagatggacgagattgtgagcatcgttcgcgacagtatgtggtacatacctaacgtatttatggacgacggtaagaatgaaggtcacgtttctgtcaacaatgtttgtcatatgtattttacgttctttgatgtggatacatcgtctcatctgtttaagctagttattaaacactgcgatctgaataaacgaggtaactctccattacattgctatacgatgaatacacgatttaatccatctgtattaaagatattgttacaccacggcatgcgtaactttgatagcaaggatgaaaaaggacaccactatctgattcattcactatcaatcgataacaagatctttgatatactaacggacaccattgatgactttagtaaatcatccgatctattgctgtgttatcttagatataaattcaatgggagcttaaactactacgttctgtacaaaggatccgaccctaattgcgccgacgaggatgaactcacttctcttcattactactgtaaacacatatccacgttctacaaaagcaattattacaagttaagtcacactaagatgcgagccgagaagcgattcatctacgcgataatagattatggagcaaacattaacgcggttacacacttaccttcaacagtataccaaacatagtcctcgtgtggtgtatgctcttttatctcgaggatacgtaataatcttgattgtacacccatcatggaacgattgtgcaacaggtcatattctcataatgttactcaattggcacgaacaaaaggaagaaggacaacatctactttatctattcataaaacataatcaaggatacactctcaatatactacggtatctactagataggttcgacattcagaaagacgaatacatataccgcctttcaaaattgtaacaacaatgttgcctcatacatcggatacgacatcaaccttccgactaaagacggtattcgacttggtgtttgaaaacagaaacatcatatacaaggcggatgttgtgaatgacatcatccaccacagactgaaagtatctctacctatgattaaatcgttgttctacaagatgtcagaattctctccctacgacgattactacgtaaaaaagatactagcctactgcctattaagggacgagtcattcgcggaactacatagtaaattctgtttaaacgaggactataaaagtgtatttatgaaaaatatatcattcgataagatagattccatcatcgtgacataagtcgcctcaaagagattcgaatctccgacaccgacctgtatacggtatcacagctatcttgaagccatacattcggacagacacatttcatttcccatgtacgacgatctcatagaacagtgccatctatcgatggagcgtaaaagtaaactcgtcgacaaagcactcaataaattagagtctaccatcggtcaatctagactatcgtatttgcctccggaaattatgcgcaatatcatctaaacagtatgttgtacggaaagaaccattacaaatattatccatgatagaaagaaaatatctatatgattggagaagtaggaaacaggaacacgacaacgattactacattattaaattatgaagtccgtattatactcgtatatattgtttctctcatgtataataataaacggaagagatatagcaccgcatgcaccatccgatggaaagtgtaaagacaacgaatacaaacgccataatttgtgtccgggaacatacgcttccagattatgcgatagcaagactaacacacaatgtacgccgtgtggttcgggtaccttcacatctcgcaataatcatttacccgcttgtctaagttgtaacggaagacgcgatcgtgtaacactactcacaatagaatctgtgaatgctctcccggatattattgtcttctcaaaggatcatccggatgcaaggcatgtgtttcccaaacaaaatgtggaataggatacggagtatccggagacgtcatctgttctccgtgtggtctcggaacatattctcacaccgtctcttccgcagataaatgcgaacccgtacccagaaatacctttaactatatcgatgtggaaattaatctgtatcccgtcaacgacacgtcgtgtactcggacgaccactaccggtctcagtgaatccatctcaacgtcggaactaactattactatgaatcataaagactgtaatcccgtatttcgtgatggatacttctccgttcttaataaggtagcgacttcaggattctttacaggagaaaggtgtgcactctgaatttcgagattaaatgcaataacaaagattcttcctccaaacagttaacgaaagcaaagaatgatgacggtatcatgccgcattcggagactgtatatctagcgtcgacatctatatactatatagtaataccaatactcaagactacgaaactgatacaatctcttatcatgtgggtaatgttctcgatgtcgatagccatatgcccggtagttgcgatatacataaactgatcactaattccaaacccacccgctttttatagtaagtttttcacccataaataataaatacaataattaatttctcgtaaaagtagaaaatatattctaatttattgcatggtaaggaagtagaatcataaagaacagtactcaatcaatagcaattatgaaacaatatatcgtcctggcatgcatgtgcctgccagtcttcagcaatcatcctcatcctcctcctcgtgtacggaagaagaaaacaaacatcatatgggaatcgatgttattatcaaagtcacaaagcaagaccaaacaccgaccaatgataagatttgccaatccgtaacggaaattacagagtccgagtcagatccagatcccgaggtggaatcagaagatgattccacatcagtcgaggatgtagatcctcctaccacttattactccatcatcggtggaggtctgagaatgaactttggattcaccaaatgtcctcagattaaatccatctcagaatccgctgatggaaacacagtgaatgctagattgtccagcgtgtccccaggacaaggtaaggactctcccgcgatcactcgtgaagaagctctggctatgatcaaagactgtgaggtgtctatcgacatcagatgtagcgaagaagagaaagacagcgacatcaagacccatccagtactcgggtctaacatctctcataagaaagtgagttacgaagatatcatcggttcaacgatcgtcgatacaaaatgtgtcaagaatctagagtttagcgttcgtatcggagacatgtgcaaggaatcatctgaacttgaggtcaaggatggattcaagtatgtcgacggatcggcatctgaaggtgcaaccgatgatacttcactcatcgattcaacaaaactcaaagcgtgtgtctgaatcgataactctattcatctgaaattggatgagtagggttaatcgaacgattcaggcacaccacgaattaaaaaagtgtaccggacactatattccggtttgcaaaacaaaaatgttcttaactacattcacaaaaagttacctctcgttacttcttctttttctgtctcaatagtgtgatacgattatgacactattcctattcctattcctatttcctttcagggtatcacaaaaatattaaacctctttctgatggtctcataaaaaaagttttacaaaaatatttttattctctttctctctttgatggtctcataaaaaaagttttacaaaaatatttttattctctttctctctttgatggtctcataaaaaaagttttacaaaaatatttttattctctttctctctttgatggtctcataaaaaaagttttacaaaaatatttttattctctttctctctttgatggtctcataaaaaaagttttacaaaaatatttttattctctttctctctttgatggtctcataaaaaaagttttacaaaaatatttttattctctttctctctttgatggtctcataaaaaaagttttacaaaaatatttttattctctttctctcttcgatggtctcacaaaaaaagttttacaaaaatatttttattctctttctctctttgatggtctcataaaaaaagttttacaaaaatatttttattctctttctctctttgatggtctcataaaaaatattaaacctctttctgatggtgtcactaaaatatttttattctcattctcattttctctttctctcttcaatggagtcataaaatatttttattctctttctctcttcgatggtctcacaaaaatattaaacctctttctgatggtgtcactaaaatatttttattctcattctcattttctctttctctcttcaatggagtcataaaatatttttattctctttctctcttcgatggtctcacaaaaatattaaacctctttctgatggagtcgtaaaaaagttttatctctttctctcttcgatggtctcactaaaatattttttattctctttctgatgcatcaactatttcttaaacaataacgtccaacaacatatactcgtcgagcttatcaacatcccctatgcccatctaggttaccagacaattgtatatcataaaataatgtttataatttacacgttaaaatcatataataaaacgtagatcgtataatattttttggtatataaatgatctagtaaaatccatgtaggggatactgctcacattttttctttggtacaaaatttcacacaagtttttatacagacaaattcttgtccatatattttaaaacattgacttttgtactaagaaaaatatctagactaactatctctttctctttctctcttcgatggtctcacaaaaatattaaacctctttctgatggagtcgtaaaaaagttttatctctttctctcttcgatggtctcacaaaaatattaaacctctttctgatggagtcgtaaaaaagttttatctctttctctcttcgatggtctcacaaaaatattaaacctctttctgatggagtcgtaaaaaagttttatctttctctcttcgatggtctcacaaaaatattaaacctctttctgatggagtcgtaaaaaagttttatctctttctctcttcgatggtctcacaaaaatattaaacctctttctgatggagtcgtaaaaaagttttatctctttctctcttcgatggtctcacaaaaatattaaacctctttctgatggagtcgtaaaaaagttttatctctttctctcttcgatggtctcacaaaaatattaaacctctttctgatggagtcgtaaaaaagttttatctctttctctcttcgatggtctcacaaaaatattaaacctctttctgatggagtcgtaaaaaagttttatctctttctctcttcgatggtctcacaaaaatattaaacctctttctgatggagtcgtaaaaaagttttatctctttctctcttcgatggtctcacaaaaatattaaacctctttctgatggagtcgtaaaaaagttttatctctttctctcttcgatggtctcacaaaaatattaaacctctttctgatggagtcgtaaaaaagttttatctctttctctcttcgatggtctcacaaaaatattaaacctctttctgatggagtcgtaaaaaagttttatctctttctctcttcgatggtctcacaaaaatattaaacctctttctgatggagtcgtaaaaaagttttatctctttctctcttcgatggtctcacaaaaatattaaacctctttctgatggagtcgtaaaaaagttttatctctttctctcttcgatggtctcacaaaaatattaaacctctttctgatggagtcgtaaaaaagttttatctctttctctcttcgatggtctcacaaaaatattaaacctctttctgatggagtcgtaaaaaagttttatctctttctctcttcgatggtctcacaaaaatattaaacctctttctgatggagtcgtaaaaaagttttatctctttctctcttcgatggtctcacaaaaatattaaacctctttctgatggagtcgtaaaaaagttttatctctttctctcttcgatggtctcacaaaaatattaaacctctttctgatggagtcgtaaaaaagttttatctctttctctcttcgatggtctcacaaaaatattaaacctctttctgatggagtcgtaaaaaagttttatctctttctctcttcgatggtctcacaaaaatattaaacctctttctgatggagtcgtaaaaaagttttatctctttctctcttcgatggtctcacaaaaatattaaacctctttctgatggagtcgtaaaaaagttttatctctttctctcttcgatggtctcacaaaaatattaaacctctttctgatggagtagtcgtaaaaaagttttatctctttctctcttcgatggtctcacaaaaatattaaacctctttctgatggagtcgtaaaaaagttttatctctttctctcttcgatggtctcacaaaaatattaaacctctttctgatggagtcgtaaaaaagttttatctctttctctcttcgatggtctcacaaaaatattaaacctctttctgatggagtcgtaaaaaagttttatctctttctctcttcgatggtctcacaaaaatattaaacctctttctgatggagtcgtaaaaaagttttatctctttctccttcgatggtctcacaaaaatattaaacctctttctgatggagtcgtaaaaaagttttatctctttctccttcgatggtctcacaaaaatattaaacctctttctgatggagtcgtaaaaaagttttatctctttctcctttctcacaaaaatattaaacctctttctgatggagtcgtaaaaaagttttatctctttctcctttctcacaaaaatattaaacctctttctgatggagtctccttcgatggtctcacaaaaatattaaacctctttctgatggagtcgtaaaaaagttttatctctttctccttcgatggtctcacaaaaatattaaacctctttctgatggagtcgtaaaaaagttttatctctttctccttcgatggtctcacaaaaatattaaacctctttctgatggagtcgtaaaaaagttttatctctttctccttcgatggtctcacaaaaatattaaacctctttctgatggagtcgtaaaaaagttttatctctttctcctttctcacaaaaatattaaacctctttctgatggagtcgtaaaaaagttttatctctttctccttcgatggtctcacaaaaatattaaacctctttctgatggagtcgtaaaaaagttttatctctttctccttcgatggtctcacaaaaatattaaacctctttctgatggagtcgtaaaaaagttttatctctttctccttcgatggtctcacaaaaatattaaacctctttctgatggtctctataaagcgattgatttttcttaccctctagagtttcctacggtcgttggtcacacatttttttctagacactaaataaatagtaaaattaaattaattataaaattatgtatatgatttactaactttagttagataagttagtaatacataaattttagtatattaatattatattttaaa

SEQ ID NO: 36 - DNA, 183369 bp, Artificial Sequence
  LIVP 1.1.1
tttttttatgagaccatcaaagagagaaagagaataaaaatatttttgtaaaactttttttatgagaccatcaaagagagaaagagaataaaaatatttttgtaaaactttttttatgagaccatcaaagagagaaagagaataaaaatatttttgtaaaactttttttatgagaccatcaaagagagaaagagaataaaaatatttttgtaaaactttttttatgagaccatcaaagagagaaagagaataaaaatatttttgtaaaactttttttatgagaccatcaaagagagaaagagaataaaaatatttttgtaaaactttttttatgagaccatcaaagagagaaagagaataaaaatatttttgtaaaactttttttatgagaccatcaaagagagaaagagaataaaaatatttttgtaaaactttttttatgagaccatcaaagagagaaagagaataaaaatatttttgtaaaactttttttatgagaccatcaaagagagaaagagaataaaaatatttttgtaaaactttttttatgagaccatcagaaagaggtttaatatttttgtgatactctgaaaggaaataggaataggaataggaatagtgtcataatcgtatcacactattgagacagaaaaagaagaagtcgcgagaggtaactttttgtgaatgtagttaagaacatttttgttttgcaaaccggaatatagtgtccggtacacttttttaattcgtggtgtgcctgaatcgttcgattaaccctactcatccaatttcagatgaatagagttatcgattcagacacacgctttgagttttgttgaatcgatgagtgaagtatcatcggttgcaccttcagatgccgatccgtcgacatacttgaatccatccttgacctcaagttcagatgattccttgcacatgtctccgatacgaacgctaaactctagattcttgacacattttgtatcgacgatcgttgaaccgatgatatcttcgtaactcactttcttatgagagatgttagacccgagtactggatgtcgctgtctttctcttcttcgctacatctgatgtcgatagacacctcacagtctttgatcatagcaagagcttcttcatgagtccttaccttgtcctggggacacgctggacaatctagcattcactgtgtttccatcagcggattctgagatggatttaatctgaggacatttggtgaatccaaagttcattctcagacctccaccgatgatggagtaataagtggtaggaggatctacatcctcgactgatgtggaatcatcttctgattccacctcgggatctggatctgactcggactctgtaatttccgttacggattggcaaatcttatcattggtcggtgtttggtcttgctttgtgactttgataataacatcgattcccatatgatgtttgttttcttcttccgtacacgaggaggaggatgaggatgattgctgaagactggcaggcatagcagctgccgccaggcacatgcatgccaggacgatatattgtttcataattgctattgattgagtactgttctttatgattctacttccttaccgtgcaataaattagaatatattttctacttttacgagaaattaattattgtatttattatttatgggtgaaaaacttactataaaaagtgggtgggtttggaattagtgatcagtttatgtatatcgcaactaccgggcatatggctatcgacatcgagaacattacccacatgataagagattgtatcagtttcgtagtcttgagtattggtattactatatagtatatagatgtcgcccactagagttactgtctccgaatgcggcatgatagtatcattctttgctttcgttaactgtttggaggaagaatctttgttattgcatttaatctcgaaattcagagtgcacacctttctcctgtaaagaaacctgaagtcgctaccttattaagaacggagaagtatccatcacgaaagacgggattacagtctttatgattcatagtaatagttagttccgacgttgagatggattcgctgagaccggtagtggtcgtccgagtacacgacgtgtcgttgacgggatacaggttaatttccacatcgatatagttaaaggtatttctgggtacgggttcgcatttatctgcggaagagacggtgtgagaatatgttccgagaccacacggagaacagatgacgtctccggatactccgtatcctattccacattttgtttgggaaacacatgccttgcatccggatgatcctttgagaagacaataatatccgggagagcattcacagattctattgtgagtcgtgttacacgatcgcgtcttccgttacaacttagacaagcgggtaaatgattattgcgagatgtgaaggtacccgaaccacacggcgtacattgtgtgttagtcttgctatcgcataatctggaagcgtatgttcccggacacaaattatggcgtttgtattcgttgtctttacactttccatcggatggtgcatgcggtgctatatctcttccgtttattattatacatgagagaaacaatatatacgagtataatacggacttcatgatttaataatgtagtaatcgtcgtcttgttcctgtttcctacttctccaatcatatagatattttctttctatcatggataatatttgtaatggttctttccgtacaacatactgtttagatgatattgcgcataatttccggaggcaaatacgatagtctagattgaccgatggtagactctaatttattgagtgctttgtcgacgagtttacttttacgctccatcgatagatggcactgttctatgagatcgtcgtacatgggaaatgaaatgtgtctgtctgaatgtatggctttaagatagctgtgataccgtatacaggtcggtgtcggagattcgaatctctttaaggcgacttatgtcacgatgatggaatctatcttatcgaatgatatatttttcataaatacacttttatagtcctcgtttaaacagaatttactatgtagttccgcgaatgactcgtcccttaataggcagtaggctagtatcttttttacgtagtaatcgtcgtagggagagacatcttgtagaacaacgatttaatcataggtagagatactttcagtctgtggtggatgatgtcattcacaacatccgccttgtatatgatgtttctgttttcaaacaccaagtcgaataccgtctttagtcggaaggttgatgtcgtatccgatgtatgaggcaacattgttgttacaattttgaaaggcggtattatagtattcgtctttctgaatgtcgaacctatctaatagataccgtagtatattgagagtgtatccttgattatgttttatgaatagataaagtagatgttgtccttcttccttttgttcgtgccaattgagtaacattatgagaatatgacctgttgcacaatcgttccatgatgggtgtacaatcaagattattacgtatcctcgtatcggctcctcgagataaaagagcatacaccacacgaggactatgtttggtatactgttgaaggtaagtgtgtaaccgcgttaatgtttgctccataatctattatcgcgtagatgaatcgcttctcggctcgcatcttagtgtgacttaacttgtaataattgctttcgtagaacgtggatatgtgtttacagtagtaatgaagagaagtgagttcatcctcgtcggcgcaattagggtcggatcctttgtacagaacgtaatagtttaagctcccattgaatttatatctaagataacacagcaatagatcggatgatttactaaagtcatcaatggtgtccgttagtatatcaaagatcttgttatcgattgatagtggtcatccttgctatcaaagttacgcatgccgtggtgtaacaatatctttaatacagatggattaaatcgtgtattcatcgtatagcaatgtaatggagagttacctcgtttattcagatcgcagtgtttaataactagcttaaacagatgagacgatgtatccacatcaaagaacgtaaaatacatatgacagacattgttgacagaaacgtgaccttcattcttaccgtcgtccataaatacgttaggtatgtaccacatactgtcgcgaacgatgcgtacaatctcgtccatctcataatgatttactttttcataattaaagatgtgaaagaaaaccgaacaatatatttttttagtaatgtttatgcgagacatataaaataaactccgtgtttatgatgccggtaaatgtttttatcatcttggacggaatcgattttgtaatatgtcatggaaacaaatgaaacaggacattatcgctccatgataaattatttaatggagtaataaagtatctccatgggtaatttcgaaatcaagttatcgtctgtattaatgttgtccactatggagtcgatcctctcattgttctttacagtttctgtaatgatggacgttagttcttttttgtaccatttgatgtcggattctttgcgtatctcaatttgtggcgtttgcttcgtttaaataatatatcaaacatggagacgcctgatatgtagacattcttcattctattaatgtctactctatagcgctttagttccttatgacgaccggcgatatcatactttactttagaaggaaaatcatcatctaggattaaggcgtatctgatacaggcgaataatggttcaggatatagatagcgtatatctctattaaatgcgtcaatcatagtctctagagtgggatggtaactcagtaataaatcaactagcttcgttttgttttctctttggtaactgcttttctggatggccgtattgattatcgagcgtgacactcgctccatattccaataaccgctttgcaaattgtatattattgacatcgaccgcgtaatatagtagagttatcgatcatatctatatcatccatgtacttgcttagtatatcaaatacatctatcagtatggtttcataacagtgatacccgcaattattaaatctcgataatatcagaccgtacatacatagacggccattgttcgatacgtgatttacagccgcgtgtccatattttccacgataaaccttacgacgtttacatcgacgagattattattaacaaagtagtcgtgcagaggatagttgttgtccgttatctaacatgcatcgaacgaccatatcgccgtaatgtaagtagtttatcaacatggcttgtacatcctgttgtctaaatctctttagaatgttatcgatgatgtagtggttatattctctggaatcgtacgaagtaatactacgcattacgtcgacaagagtatgacgtctctcaataagaagattaacgatttccatgtctacattatatggggttactctaaatcgcttgtttagataatatagggctgacgtcgtatactctacacgtgtccacatcctttattaataataatttaacaatctctatatctatggttgagaaagaccagtagtattggatgggtaaagatcctccttcgtctctgccatggatggaaacattgttatcgatcaaacatttaattacatccttggatagagattgagattctctatgagacgatatatagtaatgaagagagttcttacacatatcactgtcgtacatacaggtacgaaatacgtaaccggtgctgtaacattctgatttaagaagccatagcaatacttctggtctcggattaggcgtcgttacgtatatatccaccaatccgagaccattgattgcataattcgtattcttggacggacgtatccgtttatccacaattaggtattttagcagacgtaagtcgatattatccgaatacagatcgaaatcatttatattcgacttgagttcgttagaggaatttgaatagctggatatcagtagatgcacaatctgagattttacgtatctatgcttactgtatactcctagcggagttaatccttcgttgtttctacaaagtctctcgactccgcgagagaacaatcttaatgtctgtatcgcatttattggagacgtaacaatgtagcgcattgtttcctcgtctatctatatgttttgataagttgtgacacgtttcaatttctagttttatttttttgtacgtcacatcttcatccagtagacgacatagaatagtgcactctctaccacaataatccatagctattctggtgctaattattcctatttcacgaaggcaatcattcctcataagatgataaaaagtgtagtggagatttagtatttagcagtgcggatatgatccaagagggtgagatagtcgttctcgttcagaatctttcgcagcataagtagtatgtcgatatacttatcgttgaagactctttataaaagtctatttgtttatatttattgcggatagcagtatttccctataaaaagtatacgtcctgtggtgtctttaatcatgtacatgaatggatggtttatgtagaccttcgtacgatataccatcgaaaagttaatcgtaaatactcctgtaacggccgatgcttctgtatactcctcattaacatctataaacgtcgtatgtagaaatttttctacagtgatagtttcattacacatcttgctaaaatctgcataatatccgaatatattagtaagtcctaaattttctaaaatcggtaccagattatacggttctgtcatttccactttaaactttggcatatacaagtctatacttttagtagataacataccacaccattttttaaatttttcatctgttatatttttttctatgttatatataccttctatgtcgtccggtagtataattaccatactagagtttccctcgtatggaatatcgataatagagaatcctccgaataattcattaatatgtacatattgcaagttattctcggtacccaccatcatatcaacgctggtaactatattcttagaaatataaaacttgtctgtatatgtaagatgtttagaaaatggatatttccacattgctttaaaatggacggcgctaacaactgtcatacgagtattaatggatagcggactagtcaataaggaattaattttaccatttgtcattgtcttaacccattcgttgattagttcctttgtttggttagcattattaaagtttacagtttgaaaatcgtcttttattttttgtaggaaggaggcgtggaactcgatactatcgctaccgtatattttatttgcggtagctagtgtcgcacaatacggaatatctacctccatgtcatcattattgtcatcgggtgtattctcattcatattctctatatattttgatagttgttcagctgtagaaccagctgctccatgatttagaatagataaagtagataaaatagaaactggagaaatcaaaacattttcatccgtgtgttttaagattagttctttaaagatatccatggtatagaccaaacaataacgataacgatatatatcataaataaataatgttaaatttcagtttatgtttgtaccccgtattcatacttaacaaattggtattgcgtacacaatcaatcatattacataccattaataatgcaagcataaaaaattgttagtagatgtttctaaatataggttccgtaagcaaagaatataagaatgaagcggtaatgataaaatcaatcgttatctaaaatgatcatactcatttattttattctattatattaacacatacatttttaacagcaacacattcaatattgtattgttatttttatattatttacacaattaacaatatattattagtttatattactgaattaataatataaaattcccaatcttgtcataaacacacactgagaaacagcataaacacagaatccatcaaaaatgttgataaattatctgatgttgttgttcgctgctatgataatcagatcattcgccgatagtggtaacgctatcgaaacgacattgccagaaattacaaacgctacaacagatattccagctatcagattatgcggtccagagggagatggatattgtttacacggtgactgtatccacgctagagatattgacggtatgtattgtagatgctctcatggttatacaggcattagatgtcagcatgtagtattagtagactatcaacgttcagaaaacccaaacactacaacgtcatatatcccatctcccggtattatgcttgtattagtaggcattattatgtgttgtctattatctgtttataggttcactcgacgaactaaactacctatacaagatatggttgtgccataatttttataaatttttttatgagtatttttacaaaaatgtataaagtgtatgtcttatgtatatttataaaaatgctaagtatgcgatgtatctatgttatttgtatttatctaaacaatacctctacctctagatattatacaaaaattttttatttcggcatattaaagtaaaatctagttaccttgaaaatgaatacagtgggtggttccgtatcaccagtaagaacataatagtcaaatacagtatccgattgagattttgcatacaatactagtctagaaagaaatttgtaatcatcttctgtgacgggagtccatatatctgtatcatcgtctagtttatcagtgtcccatgctatattcctgttatcatcattagttaatgaaaataactctcgtgcttcagaaaagtcaaatattgtatccatacatacatctccaaaactatcgcttatacgtttatctttaacgatacctatacctagatggttatttactaacagacattttccagatctattgactataactcctatagtttccacatcaaccaagtaatgatcatctattgttatataacaataacataactcttttccatttttatcagtatgtatatctatatcaacgtcgtcgttgtagtgaatagtagtcattgatctattatatgaaacggatatgtctagaacggcaattgttttacgtccagttaacactttcgttgatttaaagtctagagtctttgcaaacataatatccttatccgactttatatttcctgtagggtggtataattttattttgcctccacatatcggtgtttccaaatatattactagacaatattccatatagttattagttaagggtacccaattagaacacgtacgcttattatcatcatttggatcgtatttcataaaagttattgtgttatcgatgtcaacacattctacattttttaatcgtctatatagtatttttctgatattttctataatatcagaattgtcttccatcggaagttgtatactatcggaatcagttacatgtttaaataattctctgatgtcattccttatacaatcaaattcattattaaacagtttaatagtctgtagacctttatcgtcgtaaatatccattgtcttattagttacgcttatttttatgtgtttttacgttgctttattatattttataagaatgattgtttgacgaatcacgagaactattaagacacattattaggtatatattataaaaaagtttttgattacgatgttataagaggaaagaggacacattaacatcatacatcaattaactacattcttataacatcgtaatcaaaagaattgcaattttgatgtataacaactgtcaatgggttatggaattgtatattacatattatacggtatgttggtaacgacaaataccggtcggtaattgtctgccggtgtaatagaattatatatatctatctattacaccggccttgtatacataataataagttgtggtagtatgatctccatatttataatttaggactttgtattcagtatttttggaatcataaaaaataaaaaaaagttttactaatttaaaatttaaaaagtatttacatttttttcactgtttagtcgcggatatggaattcgatcctgccaaaatcaatacatcatctatagatcatgtaacaatattacaatacatagatgaaccaaatgatataagactaacagtatgcattatccgaaatattatatcaatatcacaaaaataaatacacatttggctaatcaatttcgggcttggaaaaaacgtatcgccggaagggactatatgactaacttatctagagatacaggaatacaacaatcaaaacttactgaaactatacgtaactgtcaaaaaaatagaaacatatatggtctatatatacactacaatttagttattaattggataaccgatgtgattatcaatcaatattaagagggttggtaaattggtacatagctaataatacctatactccaaatacacccaataatacaacaaccatttctgagttggatatcatcaaaatactggataaatacgaggacgtgtatagagtaagtaaagaaaaagaatgtggaatttgctatgaagttgtttactcaaaacgatagatactttggtttattggattcgtgtactcatatattttgcataacatgcatcaatatatggcatagaacacgaagagaaaccggtgcgtcggataattgtcctatatgccgtacccgttttagaaacataacaatgagcaagttctataagctagttaactaataaataaaaagtttaatttgttgacgacgtatgtcgttattttttctcgtataaaagattaatttgattctaatataatctttagtattggataaatatcaattcaaattaattccattagattatatcataaataaaaatagtagcacgcactacttcagccaaatattcttttttgaaacgccatctatcgtagtgaggacacaagtgaacctataattatcaaatttattagtatcggttacatgaaggactttacgtagagtgacgattccactatctgtggtacgaacggtttcatcttctttgatgccatcacccagatgttctataaacttggtatcctcgtccgatctcatatcctttgccaaccaatacatgtagctaaaattaggcataaatttcacacatcctgaacaatgaaattctccagaagatgttacaatgtctagatttggacatttggtttcaaccgcgttaacatatgagtgaacacacccatacatgaaagcgatgagaaataggattctcatcttgccaaaatatcactagaaaaaatttatttatcagttttaaaggtataaaaaatacttattgttgctcgaatattttgtatttgatggtatacggaagattagaaatgtaggtattatcatcaactgattctatggttttatgtattctatcatgtttcactattgcgttggaaataatatcatatgcttccacatatattttattttgttttaactcataatactcacgtaattctggattattggcatatctatgaataattttagctccatgatcagtaaatattaatgagaacatagtattaccacctaccattatttttttcatctcattcaattcttaattgcaaagatctatataatcattatagcgttgacttatggactctggaatcttagacgatgtacagtcatctataatcatggcatatttaatacattgttttatagcatagtcgttatctacgatgttagatatttctctcaatgaatcaatcacacaatctaatgtaggtttatgacataatagcattttcagcagttcaatgtttttagattcgttgatggcaatggctatacatgtatatccgttatttgatctaatgttgacatctgaaccggattctagcagtaaagatactagagattgtttattatatctaacagccttgtgaagaagtgtttctcctcgtttgtcaatcatgttaatgtctttaagataaggtaggcaaatgtttatagtactaagaattgggcaagcataagacatgtcacaaagacccttttttgtatgtataagtgtaaaaattataacatccatagttggatttacataggtgtccaatcgggatctctccatcatcgagataattgatggcatctcccttccttttttagtagatatttcatcgtgtaagaatcaatattaatatttctaaagtatccgtgtatagcctctttatttaccacagctccatattccactagagggatatcgccgaatgtcatatactcaattagtatatgttggaggacatccgagttcattgttttcaatatcaaagagatggtttccttatcatttctccatagtggtacaatactacacattattccgtgcggctttccattttccaaaaacaatttgaccaaatctaaatctacatctttattgtatctataatcactatttagataatcagccataattcctcgagtgcaacatgttagatcgtctatatatgaataagcagtgttatctattcctttcattaacaatttaacgatgtctatatctatatgagatgacttaatataatattgaagagctgtacaatagtttttatctataaaagacggcttgattccgtgattaattagacatttaacaacttccggacgcacatatgctctcgtatccgactttgaatacagatgagagatgatatacagatgcaatacggtaccgcaatttcgtagttgataatcatcatacgcgtatcagtactcgtcctcataaagaacactgcagccattttctatgaacaaatcaataattttagaaacaggatcattgtcattacataattttctataactgaacgatggttttcacatttaacactcaagtcaaatccatgttctaccaacacctttatcaagtcaacgtctacatttttggatttcatatagctgaatatattaaagttatttatgttgctaaatccagtggcttctagtagagccatcgctatatccttattaactttaacatgtctactatttgtgtattcttctaatggggtaagctgtctccaatttttgcgtaatggattagtgccactgtctagtagtagtttgacgacctcgacattattacaatgctcattaaaaaggtatgcgtgtaaagcattattcttgaattggttcctggtatcattaggatctctgtctttcaacatctgtttaagttcatcaagagccacctcctcattttccaaatagtcaaacattttgactgaatgagctactgtgaactctatacacccacacaactaatgtcattaaatatcatgtcaaaaacttgtacaattattaataaaaataatttagtgtttaaattttaccagttccagattttacacctccgttaatacctccattaaccccactggacgatcctcctccccacattccaccgccaccagatgtataagttttagatcctttattactaccatcatgtccatggataaagacactccacatgccgccactaccccctttagaagacatattaataagacttaaggacaagtttaacaataaaattaatcacgagtaccctactaccaacctacactattatatgattatagtttctatttttacagtaccttgactaaagtttctagtcacaagagcaatactaccaacctacactattatatgattatagtttctatttttataggaacgcgtacgagaaaatcaaatgtctaatttctaacggtagtgttgataaacgattgttatccgcggatacctcctctatcatgtcgtctattttcttactttgttctattaacttattagcattatatattatttgattataaaacttatattgcttattagcccaatctgtaaatatcggattattaacatatcgtttctttgtaggtttatttaacatgtacatcactgtaagcatgtccttaccatttattttaatttgacgcatatccgcaatttctttttcgcagtcggttataaattctatatatgatggatacatgctacatgtgtacttataatcgactaatatgaagtacttgatacatattttcagtaacgatttattattaccacctatgaataagtacctgtgatcgtctaggtaatcaactgttttcttaatacattcgatggttggtaatttactcagaataatttccaatatcttaatatataattctgctatttctgggatatatttatctgccagtataacacaaatagtaatacatgtaaacccatattttgttattatattaatgtctgcgccattatctattaaccattctactaggctgacactatgcgactcaatacaatgataaagtatactacatccatgtttatctattttgtttatatcatcaatatacggcttacaaagttttagtatcgataacacatccaactcacgcatagagaaggtagggaataatggcataatatttattaggttatcatcattgtcattatctacaactaagtttccattttttaaaatatactcgacaactttaggatctctattgccaaatttttgaaaatatttatttatatgcttaaatctatataatgtagctccttcatcaatcatacatttaataacattgatgtatactgtatgataagatacatattctaacaatagatcttgtatagaatctgtatatcttttaagaattgtggatattaggatattattacataaactattacacaattctaaaatataaaacgtatcacggtcgaataatagttgatcaactatataattatcgattttgtgatttttcttcctaaactgtttacgtaaatagttagatagaatattcattagttcatgaccactatagttactatcgaataacgcgtcaaatatttcccgtttaatatcgcatttgtcaagataataatagagtgtggtatgttcacgataagtataataacgcatctctttttcgtgtgaaattaaatagtttattacgtccaaagatgtagcataaccatcttgtgacctagtaataatataataatagagaactgttttacccattctatcatcataatcagtggtgtagtcgtaatcgtaatcgtctaattcatcatcccaattataatattcaccagcacgtctaatctgttctattttgatcttgtatccatactgtatgttgctacatgtaggtattcctttatccaataatagtttaaacacatctacattgggatttgatgttgtagcgtatttttctacaatattaataccatttttgatactatttatttctatacctttcgaaattagtaatttcaataagtctatattgatgttatcagaacatagatattcgaatatatcaaaatcattgatatttttatagtcgactgacgacaataacaaaatcacaacatcgtttttgatattattatttttcttggtaacgtatgcctttaatggagtttcaccatcatactcatataatggatttgcaccactttctatcaatgattgtgcactgctggcatcgatgttaaatgttttacaactatcatagagtatcttatcgttaaccatgattggttgttgatgctatcgcattttttggtttctttcatttcagttatgtatggatttagcacgtttgggaagcatgagctcatatgatttcagtactgtagtgtcagtactattagtttcaataagatcaatctctagatctatagaatcaaaacacgataggtcagaagataatgaatatctgtacgcttcttgttgtactgtaacttctggttttgttagatggttgcatcgtgctttaacgtcaatggtacaaattttatcctcgctttgtgtatcatattcgtccctactataaaattctatattcagattatcatgcgatgtgtatacgctaacggtatcaataaacggagcacaccatttagtcataaccgtaatccaaaaatttttaaagtatatcttaacgaaagaagttgtatcattgtctacggtgtatggtactagatcctcataagtgtatatatctagagtaatgtttaatttattaaatggttgataatatggatcgtcgtggcaatttcctaagatggaaatgagatatagacacgcaataaatctaatcgaagacatggttactccttaaaaaaatacgaataatcaccttggctatttagtaagtgtcatttaacactatactcatattaatccatggactcataatctctatacgggattaacggatgttctatatacggggatgagtagttctcttctttaactttatactttttactaatcatatttagactgatgtatgggtaatagtgtttgaagagctcgttctcatcatcagaataaatcaatatctctgtttttttgttatacagatgtattacagcctcatatattacgtaatagaacgtgtcatctaccttattaactttcaccgcatagttgtttgcaaatacggttaatcctttgacctcgttgatttccgaccaatctgggcgtataatgaatctaaactttaatttcttgtaatcattcgaaataatttttagtttgcatccgtagttatcccctttatgtaactgtaaatttctcaacgcgatatctccattaataatgatgtcgaattcgtgctgtatacccatactgaatggatgaacgaataccgacggcgttaatagtaatttactttttcatctttacatattgggtactagttttactatcataagtttataaattccacaagctactatggaataagccaaccatcttagtataccacacatgtcttaaagtttattaattaattacatgttgttttatatatatcgctacgaatttaaacagagaaatcagtttaggaaaaaaaaaattatctatctacatcatcacgtctctgtattctacgatagagtgctactttaagatgagacatatccgtgtcatcaaaaatatactccattaaaatgattattccggcagcgaacttgatattggatatatcacaacctttgttaatatctacgacaatagacagcagtcccatggttccataaacagtgagtttatctttctttgaagagatattttgtagagatcttataaaactgtcgaatgacatcgcatttatatctttagctaaatcgtatatgttaccatcgtaatatctaaccgcgtctatcttaaacgtttccatcgctttaaagacgtttccgatagatggtctcatttcatcagtcatactgagccaacaaatataatcgtgtataacatctttgatagaatcagactctaaagaaaacgaatcggctttattatacgcattcatgataaacttaatgaaaaatgtttttcgttgtttaagttggatgaatagtatgtcttaataattgttattatttcattaattaatatttagtaacgagtacactctataaaaacgagaatgacataactaatcataactagttatcaaagtgtctaggacgcgtaattttcatatggtatagatcctgtaagcattgtctgtattctggagctattttctctatcgcattagtgagttcagaatatgttataaatttaaatcgaataacgaacataactttagtaaagtcgtctatattaactcttttattttctagccatcgtaataccatgtttaagatagtatattctctagttactacgatctcatcgttgtctagaatatcacatactgaatctacatccaattttagaaattggtctgtgttacatatctcttctatattattgttgatgtattgtcgtagaaaactattacgtagaccattttctttataaaacgaatatatagtactccaattatctttaccgatatatttgcacacataatccattctctcaatcactacatctttaagattttcgttgttaagatatttggctaaactatataattctattagatcatcaacagaatcagtatatatttttctagatccaaagacgaactctttggcgtcctctataatattcccagaaaagatattttcgtgttttagtttatcgagatctgatctgttcatatacgccatgattgtacggtacgttatgataaccgcataaaataaaaatccattttcatttttaaccaatactattcataattgagattgatgtaatactttgttactttgaacgtaaagacagtacacggatccgtatctccaacaagcacgtagtaatcaaatttggtgttgttaaacttcgcaatattcatcaatttagatagaaacttatactcatcatctgttttaggaatccatgtattattaccactttccaacttatcattatcccaggctatgtttcgtccatcatcgttgcgcagagtgaataattcttttgtattcggtagttcaaatatatgatccatgcatagatcggcaaagctattgtagatgtgatttttcctaaatctaatataaaactcgtttactagcaaacactttcctgatttatcgaccaagacacatatggtttctaaatctatcaagtggtggggatccatagttatgacgcagtaacatatattattacattcttgactgtcgctaatatctaaatatttattgttatcgtattggattctgcatatagatggcttgtatgtcaaagatatagaacacataaccaatttatagtcgcgctttacattctcgaatctaaagttaagagatttagaaaacattatatcctcggatgatgttatcactgtttctggagtaggatatattaaagtctttacagatttcgtccgattcaaataaatcactaaataatatcccacattatcatctgttagagtagtatcattaaatctattatattttatgaaagatatatcactgctcacctctatatttcgtacatttttaaactgtttgtataatatctctctgatacaatcagatatatctattgtgtcggtagacgataccgttacatttgaattaatggtgttccattttacaacttttaacaagttgaccaattcatttctaatagtatcaaactctccatgattaaatattttaatagtatccattttatatcactacggacacaaagtagctgacataaaccattgtataatttttatgttttatgtttattagcgtacacattttggaagttccggcttccatgtatttcctggagagcaagtagatgatgaggaaccagatagtttatatccgtacttgcacttaaagtctacattgtcgttgtatgagtatgatcttttaaacccgctagacaagtatccgtttgatattgtaggatgtggacatttaacaatctgacacgtgggtggatcggaccattctcctcctgaacacaggacactagagttaccaatcaacgaatatccactattgcaactataagttacaacgctcccatcggtataaaaatcctcgtatccgttatgtcttccgttggatatagatggaggggattggcatttaacagattcacaaataggtgcctcgggattccataccatagatccagtagatcctaattcacaatacgatttagattcaccgatcaactgatatccgctattacaagagtacgttatactagagccaaagtctactccaccaatatcaagttggccattatcgatatctcgaggcgatgggcatctccgtttaatacattgattaaagagtgtccatccagtacctgtacatttagcatatataggtcccattttttgctttctgtatccaggtagacatagatattctatagtgtctcctatgttgtaattagcattagcatcagtctccacactattcttaaatttcatattaatgggtcgtgacggaatagtacagcatgatagaacgcatcctattcccaacaatgtcaggaacgtcacgctctccaccttcatatttatttatccgtaaaaatgttatcctggacatcgtacaaataataaaaagcccatatatgttcgctattgtagaaattgtttttcacagttgctcaaaaacgatggcagtgacttatgagttacgttacactttggagtctcatctttagtaaacatatcataatattcgatattacgagttgacatatcgaacaaattccaagtatttgattttggataatattcgtattttgcatctgctataattaagatataatcaccgcaagaacacacgaacatctttcctacatggttaaagtacatgtacaattctatccatttgtcttccttaactatatatttgtatagataattacgagtctcgtgagtaattccagtaattacatagatgtcgccgtcgtactctacagcataaactatactatgatgtctaggcatgggagacttttttatccaacgatttttagtgaaacattccacatcgtttaatactacatatttctcatacgtggtataaactccacccattacatatatatcatcgtttacgaataccgacgcgcctgaatatctaggagtaattaagtttggaagtcttatccatttcgaagtgccgtgtttcaaatattctgccacacccgttgaaatagaaaattctaatcctcctattacatataactttccatcgttaacacaagtactaacttctgattttaacgacgacatattagtaaccgttttccattttttcgttttaagatctacccgcgatacggaataaacatgtctattgttaatcatgccgccaataatgtatagacaattatgtaaaacatttgcattatagaattgtctatctgtattaccgactatcgtccaatattctgttctaggagagtaatgggttattgtggatatataatcagagtttttaatgactactatattatgttttataccatttcgtgtcactggctttgtagatttggatatagttaatcccaacaatgatatagcattgcgcatagtattagtcataaacttgggatgtaaaatgttgatgatatctacatcgtttggatttttatgtatccactttaataatatcatagctgtaacatcctcatgatttacgttaacgtcttcgtgggataagatagttgtcagttcatcctttgataattttccaaattctggatcggatgtcaccgcagtaatattgttgattatttctgacatcgacgcattatatagttttttaattccatatcttttagaaaagttaaacatccttatacaatttgtgaaattaatattatgaatcatagtttttacacatagatctactacaggcggaacatcaattattatggcagcaactagtatcatttctacattgtttatggtgatgtttatcttcttccagcgcatatagtctaatagcgattcaaacgcgtgatagtttataccattcaatataatcgcttcatcctttagatggtgatcctgaatgcgtttaaaaaaattatacggagacgccgtaataatttccttattcacttgtataatttccccattgatagaaaatattacgctttccattcttaaagtactataagtaattatagtataatgtaaacgtttatatattcaatatttttataaaaatcattttgacattaattcctttttaaatttccgtctatcatctatagaaacgtattctatgaatttataaaatgcttttacgtgtcctatcgtaggcgatagaaccgctaaaaagcctatcgaatttctacaaaagaatctgttatatggtatagggagagtataaaacattaaatgtccgtacttattaaagtattcagtagccaatcctaactctttcgaatacttattaatggctcttgttctgtacgaatctatttttttgaacaacggacctagtggtatatcttgttctatgtatctaaaataatgtctgactagatccgttagtttaatatccgcagtcatcttgtctagaatggcaaatctaactgcgggtttaggctttagtttagtttctatatctacatctatgtctttatctaacaccaaaaatataatagctaatattttattacaatcatccggatattcttctacgatctcactaactaatgtttctttggttatactagtatagtcactatcggacaaataaagaaaatcagatgatcgatgaataatacatttaaattcatcatctgtaagatttttgagatgtctcattagaatattattagggttagtactcattatcattcggcagctattacttattttattatttttcaccatatagatcaatcattagatcatcaaaatatgtttcaatcatcctaaagagtatggtgaatgactcttcccatctaatttctgaacgttcaccaatgtctctagccactttggcactaatagcgatcattcgcttagcgtcttctatattattaactggttgatttaatctatctagcaatggaccgtcggacagcgtcattctcatgttcttaatcaatgtacatacatcgccgtcatctaccaattcatccaacaacataagctttttaaaatcatcattataataggtttgatcgttgtcatttctccaaagaatatatctaataagtagagtcctcatgcttagttaacaactattttttatgttaaatcaattagtacaccgctatgtttaatacttattcatattttagtttttaggattgagaatcaatacaaaaaattaatgcatcattaattttagaaatacttagtttccacgtagtcaatgaaacatttgaactcatcgtacaggacgttctcgtacaggacgtaactataaaccggtttatatttgttcaagatagatacaaatccgataactttttttacgaattctacgggatccactttaaaagtgtcataccgggttctttttatttttttaaacagatcaatggtgtgatgttgattaggtcttttacgaatttgatatagaatagcgtttacatatcctccataatggtcaatcgccatttgttcgtatgtcataaattctttaattatatgacactgtgtattatttagttcatccttgttcattgttaggaatctatccaaaatggcaattatactagaactataggtgcgttgtatacacatattgatgtgtctgtttatacaatcaatgctactaccttcgggtaaaattgtagcatcatataccatttctagtactttaggttcattattatccattgcagaggacgtcatgatcgaatcataaaaaaatatattatttttatgttattttgttaaaaataatcatcgaatacttcgtaagatactccttcatgaacataatcagttacaaaacgtttatatgaagtaaagtatctacgatttttacaaaagtccggatgcataagtacaaagtacgcgataaacggaataataatagatttatctagtctatctttttctatagctttcatagttagatacatggtctcagaagtaggattatgtaacatcagcttcgataaaatgactgggttatttagtcttacacattcgctcatacatgtatgaccgttaactacagagtctacactaaaatgattgaacaatagatagtctaccattgtttcgtattcagatagtacagcgtagtacatggcatcttcacaaattatatcattgtctaatagatatttgacgcatcttatggatcccacttcaacagccatcttaaaatcggtagaatcatattgctttcctttatcattaataatttctagaacatcatctctatcataaaagatacaaatattaactgtttgatccgtaataacattgctagtcgatagcaatttgttaataagatgcgctgggctcaatgtcttaataagaagtgtaagaggactatctccgaatttgttttgtttattaacatccgttgatggaagtaaaagatctataatgtctacattcttgactgttttagagcatacaatatggagaggtgtatttccatcatgatctggttttgagggactaattcctagtttcatcatccatgagattgtagaagcttttggattgtctgacataagatgtctatgaatatgatttttgccaaatttatccactatcctggcttcgaatccgatggacattatttttttaaacactctttctgaaggatctgtacacgccaacaacggaccacatccttcttcatcaaccgagttgttaatcttggctccatactgtaccaataaatttattctctctatgacttcatcatctgttcccgagagataatatagaggcgttttatgctgtttatcacacgcgtttggatctgcgccgtgcgtcagcagcatcgcgactattctattattattaattttagaagctatatgcaatggataatttccatcatcatccgtctcatttggagagtatcctctatgaagaagttcttcgacaaatcgttcatctagtcctttaattccacaatacgcatgtagaatgtgataattatttccagaaggttcgatagcttgtagcatattcctaaatacatctaaatttttactattatatttggcataaagagatagataatactcggccgacataatgttgtccattgtagtataaaaattaatatttctatttctgtatatttgcaacaatttactctctataacaaatatcataacttagttcttttatgtcaagaaggcactggtttagttcatctataaatgtcacgccataactaccacgcatgccatactcagaattatgataaagatatttatccttggggtgtaggtaatggggattaatctttgttggatcagtctctaagttaacacatgtcacacatgatccatttatagttatatcacacgatgatgatttatgaattgattccggaagatcgctatcgtattttgtggttccacaattcatttccatacatgttattgtcacactaatattatgatgaactttatctagccgctgagtggtaaacaacagaacagatagtttattatctttaccaacaccctcagccgctgccacaaatctctgatccgtatccatgatggtcatgtttatttctagtccgtatccagtcaacactatgttagcatttctgtcgatatagctttcactcatatgacactcaccaataatagtagaattaatgtcgtaatttacaccaatagtgagttcggcggcaaagtaccaataccggtaatcttgtcgaggaggacatatagtattcttgtattctaccgaatacccgagagatgcgatacaaaagagcaagactaatttgtaaaccatcttactcaaaatatgtaacaatagtacgatgcaatgagtaagacaataggaaatctatcttatatacacataattattctatcaattttaccaattagttagtgtaatgttaacaaaaatgtgggagaatctaattagtttttctttacacaattgacgtacatgagtctgagttccttgtttttgctaattatttcatccaatttattattcttgacgatatcgagatcttttgtataggagtcaaacttgtattcaacatgcttttctataatcattttagctatttcggcatcatccaatagtacattttccagattagcagaatagatattaatgtcgtatttgaacagagcctgtaacatctcaatgtctttattatctatagccaatttaatgtccggaatgaagagaagggaattattggtgtttgtcgacgtcatatagtcgagcaagagaatcatcatatccacgtgtccattttttatagtgatgtgaatacaactaaggagaatagccagatcaaaagtagatggtatctctgaaagaaagtaggaaacaatacttacatcattaagcatgacggcatgataaaatgaagttttccatccagttttcccatagaacatcagtctccaatttttcttaacaaacagttttaccgtttgcatgttaccactatcaaccgcataatacaatgcggtgtttcccttgtcatcaaattgtgaatcatccagtccactgaatagcaaaatctttactattttggtatcttccaatgtggctgcctgatgtaatggaaattcattctctagaagatttttcaatgctccagcgttcaacaacgtacatactagacgcacgttattatcagctattgcataatacaaggcactatgtccatggacatccgccttaaatgtatctttactagagagaaagcttttcagctgcttagacttccaagtattaattcgtgacagatccatgtctgaaacgagacgctaattagtgtatattttttcattttttataattttgtcatattgcaccagaattaataatatctttaatagatctgattagtagatacatggctatcgcaaaacaacatatacacatttaataaaaataatatttattaagaaaattcagatttcacgtacccatcaatataaataaaataatgattccttacaccgtacccatattaaggagattccaccttacccataaacaatataaatccagtaatatcatgtctgatgatgaacacaaatggtgtattaaattccagtttttcaggagatgatctcgccgtagctaccataatagtagatgcctctgctacagttccttgttcgtcgacatctatctttgcattctgaaacattttataaatatataatgggtccctagtcatatgtttaaacgacgcattatctggattaaacatactaggagccatcatttcggctatcgacttaatatccctcttattttcgatagaaaatttagggagtttaagattgtacactttattccctaattgagacgaccaatagtctaattttgcagccgtgatagaatctgtgaaatgggtcatattatcacctattgccaggtacatactaatattagcatccttatacggaaggcgtaccatgtcatattctttgtcatcgattgtgattgtatttccttgcaatttagtaactacgttcatcatgggaaccgttttcgtaccgtacttattagtaaaactagcattgcgtgttttagtgatatcaaacggatattgccatatacctttaaaatatatagtattaatgattgcccatagagtattattgtcgagcatattagaatctactacattagacataccggatctacgttctactatagaattaattttattaaccgcatctcgtctaaagtttaatctatataggccgaatctatgatattgttgataatacgacggtttaatgcacacagtattatctacgaaactttgataagttagatcagtgtacgtatatttagatgttttcagcttagctaatcctgatattaattctgtaaatgctggacccagatctctttttctcaaatccatagtcttcaataattctattctagtattacctgatgcaggcaatagcgacataaacatagaaaacgaataaccaaacggtgagaagacaatattatcatcttgaatatttttatacgctactataccggcattggtaaatccttgtagacgataggcggacgctgaacacgctaacgatagtatcaataacgcaatcatgattttatggtattaataattaaccttatttttatgttcggtataaaaaaattattgatgtctacacatccttttgtaattgacatctatatatccttttgtataatcaactctaatcactttaacttttacagttttccctaccagtttatccctatattcaacatatctatccatatgcatcttaacactctctgccaagatagcttcagagtgaggatagtcaaaaagataaatatatagagcataatcattctcgtatactctgccctttattacatcacccgcattgggcaacgaataacaaaatgcaagcatcttgttaacgggctcgtaaattgggataaaaattatgtttttattgtcttatatctattttattcaagagaatattcaggaatttctttttccggttgtatctcgtcgcagtatatatcatttgtacattgtttcatattttttaatagtttacaccttttagtaggactagtatcgtacaattcatagctgtattttgaattccaatcacgcataaaaatatcttccaattgttgacgaagacctaatccatcatccggtgtaatattaatagatgctccacatgtatccgtaaagtaatttcctgtccaatttgaggtacctatataggccgttttatcggttaccatatatttggcatggtttaccctagaatacggaatgggaggatcagcatctggtacaataaatagctttacttctatatttatgtttttagattttagcatagcgatagatcttaaaaagtttctcatgataaacgaagatcgttgccagcaactaatcaatagcttaacggatacttgtctgtctatagcggatcttcttaattcatcttctatataaggccaaaacaaaattttacccgccttcgaataaataatagggataaagttcataacagatacataaacgaatttactcgcatttctaatacatgacaataaagcggttaaatcattggttctttccatagtacatagttgttgcggtgcagaagcaataaatacagagtgtggaacgccgcttacgttaatactaagaggatgatctgtattataatacgacggataaaagtttttccaattatatggtagattgttaactccaagataccagtatacctcaaaaatttgagtgagatccgctgccaagttcctattattgaagatcgcaatacccaattccttgacctgagttagtgatctccaatccatgttagcgcttcctaaataaatatgtgtattatcagatatccaaaattttgtatgaagaactcctcctaggatatttgtaatatctatgtatcgtacttcaactccggccatttgtagtctttcaacatcctttaatggtttgttagatttattaacggctactctaactcgtactcctcttttgggtaattgtacaatctcgtttaatattatcgtgccgaaattcgtacccacttcatccgataaactccaataaaaagatgatatatctagtgtttttgtggtattggatagaatttccctccacatgttaaatgtagacaaatatactttatcaaattgcatacctataggaatagtttctgtaatcactgcgattgtattatccggattcattttatttgttaaaagaataatcctatatcacttcactctattaaaaatccaagtttctatttctttcatgactgattttttaacttcatccgtttccttatgaagatgatgtttggcaccttcataaatttttatttctctattacaatttgcatgttgcatgaaataatatgcacctaaaacatcgctaatcttattgtttgttccctggagtatgagagtcgggggggtgttaatcttggaaattatttttctaaccttgttggtagccttcaagacctgactagcaaatccagccttaattttttcatgattgactaatgggtcgtattggtatttataaactttatccatatctctagatactgattctggacatagctttccgactggcgcatttggtgtgatggttcccataagtttggcagctagcagattcagtcttgaaacagcatctgcattaactagaggagacattagaatcattgctgtaaacaagtttggattatcgtaagaggctagctcccatggaatgacccaataagtagatttaatagttaccacgtgctgtaccaaagtcatcaatcatcattttttcaccattacttcttccatgtccaatatgatcatgtgagaatactaaaattcctaacgatgatatgttttcagctagttcgtcataacgtccagaatgtttaccagctccatgacttatgaatactaatgccttaggatatgtaataggtttccaatatttacaatatatgtaatcattgtccagattgaacatacagtttgcactcatgattcacgttatataactatcaatattaacagttcgtttgatgatcatattatttttatgttttattgataattgtaaaaacatacaattaaatcaatatagaggaaggagacggctactgtcttttgtaagatagtcatggcgactaaattagattatgaggatgctgttttttactttgtggatgatgataaaatatgtagtcgcgactccatcatcgatctaatagatgaatatattacgtggagaaatcatgttatagtgtttaacaaagatattaccagttgtggaagactgtacaaggaattgatgaagttcgatgatgtcgctatacggtactatggtattgataaaattaatgagattgtcgaagctatgagcgaaggagaccactacatcaattttacaaaagtccatgatcaggaaagtttattcgctaccataggaatatgtgctaaaatcactgaacattggggatacaaaaagatttcagaatctagattccaatcattgggaaacattacagatttgatgaccgacgataatataaacatcttgatactttttctagaaaaaaaattgaattgatgatataggggtcttcataacgcataattattacgttagcattctatatccgtgttaaaaaaaattatcctatcatgtatttgagagttttatatgtagcaaacatgatagctgtgatgccaataagctttagatattcacgcgtgctagtgttagggatggtattatctggtggtgaaatgtccgttatataatctacaaaacaatcatcgcatatagtatgcgatagtagagtaaacatttttatagtttttactggattcatacatcgtctacccaattcggttataaatgaaattgtcgccaatcttacacccaaccccttgttatccattagcatagtattaacttcgttatttatgtcataaactgtaaatgattttgtagatgccatatcatacatgatattcatgtccctattataatcattactaactttatcacaatatatgttgataatatctatatatgatctagtctttgtgggcaactgtctatacaagtcgtctaaacgttgtttactcatatagtatcgaacagccatcattacatggtcccgttccgttgatagataatcgagtatgttagtggacttgtcaaatctatataccatattttctggaagtggatatacatagtcgtgatcaacattattgctagcctcatcttctatatcctgtactataccattatctatatcatctacataatctatgatattattacacataaacatcgacaacatactattgtttattatctaagtcctgttgatccaaacccttgatctcctctatttgtactatctagagattgtacttcttccagttctggataatatatacgttgatagattagctgagctattctatctccagtatttacattaaacgtacattttccattattaataagaatgactcctatgtttcccctataatcttcgtctattacaccacctcctatatcaatgccttttagtgacagaccagacctaggagctattctaccatagcagaacttaggcatggacatactaatatctgtcttaattaactgtctttctcctggagggatagtataatcgtaagcgctatacaaatcatatccggcagcacccggcgattgcctagtaggagatttagctctgttagtttccttaacaaatctaactggtgagttaatattcatgttgaacataaaactaatattttatttcaaaattatttaccatcccatatattccatgaataagtgtgatgattgtacacttctatagtatctatatacgatccacgataaaatcctcctatcaatagcagtttattatccactatgatcaattctggattatccctcggataaataggatcatctatcagagtccatgtattgctggattcacaataaaattccgcatttctaccaaccaagaataaccttctaccgaacactaacgcgcatgatttataatgaggataataagtggatggtccaaactgccactgatcatgattgggtagcaaatattctgtagttgtatcagtttcagaatgtcctcccattacgtatataacattgtttatggatgccactgctggattacatctaggtttcagaagactcggcatattaacccaagcagcatccccgtggaaccaacgctcaacagatgtgggatttggtagacctcctactacgtataatttattgttagcgggtatcccgctagcatacagtctggggctattcatcggaggaattggaatccaattgtttgatatataatttaccgctatagcattgttatgtatttcattgttcatccatccaccgatgagatatactacttctccaacatgagtacttgtacacatatggaatatatctataatttgatccatgttcataggatactctatgaatggatacttgtatgatttgcgtggttgtttatcacaatgaaatattttggtacagtctagtatccattttacattatttatacctctgggagaaagataatttgacctgattacatttttgataaggagtagcagatttcctaatttatttcttcgctttatataccacttaatgacaaaatcaactacataatcctcatctggaacatttagttcatcgctttctagaataagtttcatagatagataatcaaaattgtctatgatgtcatcttccagttccaaaaagtgtttggcaataaagtttttagtatgacataagagattggatagtccgtattctatacccatcatgtaacactcgacacaatattcctttctaaaatctcgtaagataaagtttatacaagtgtagatgataaattctacagaggttaatatagaagcacgtaataaattgacgacgttatgactatctatatatacctttccagtatacgagtaaataactatagaagttaaactgtgaatgtcaaggtctagacaaaccctcgtaactggatctttatttttcgtgtatttttgacgtaaatgtgtgcgaaagtaaggagataactttttcaatatcgtagaattgactattatattgcctcctatggcatcaataattgttttgaatttcttagtcatagacaatgctaatatattcttacagtacacagtattgacaaatatcggcatttatgtttctttaaaagtcaacatctagagaaaaatgattatctttttgagacataactcccattttttggtattcacccacacgtttttcgaaaaaattagtttttccttccaatgatatattttccatgaaatcaaacggattggtaacattataaatttttttaaatcccaattcagaaatcaatctatccgcgacgaattctatatatgttttcatcatttcacaattcattcctataagtttaactggaagagccgcagtaagaaattcttgttcaatggatactgcatctgttataatagatctaacggtttcttcactcggtggatgcaataaatgtttaaacatcaaacatgcgaaatcgcagtgcagaccctcgtctctactaattagttcgttggaaaacgtgagtccgggcattaggccacgctttttaagccaaaatatggaagcgaatgatccggaaaagaagattccttctactgcagcaaaggcaataagtctctctccataaccggcgctgtcatgtatccacttttgagcccaatcggccttcttttttacacaaggcatcgtttctatggcattaaagagatagtttttttcattactatctttaacataagtatcgatcaaaagactatacatttccgaatgaatgttttcaatggccatctgaaatccgtagaaacatctagcctcggtaatctgtacttctgtacaaaatcgttccgccaaattttcattcactattccgtcactggctgcaaaaaacgccaatacatgttttataaaatatttttcgtctggtgttagtttattccaatcattgatatctttagatatatctacttcttccactgtccaaaatgatgcctctgcctttttatacatgttccagatgtcatgatattggattgggaaaataacaaatctatttggatttggtgcaaggatgggttccataactaaattaacaataacaataaattttttttcagttatctatatgcctgtacttggattttttgtacatcgatatcgccgcaatcactacaataattacaagtattattgatagcattgttattagtactatcataattaaattatctacattcatgggtgctgaataatcgttattatcatcattatcattttgtaattgtgacatcatactagataaatcgtttgcgagattgttgtgggaagcgggcatggaggatgcattatcattattatttaacgccttccatttggattcacaaatgttacgcacattcaacattttatggaaactataattttgtgaaaacaaataacaagaaaactcgtcatcgttcaaatttttaacgatagtaaaccgattaaacgtcgagctaatttctaacgctagcgactctgttggatatgggtttccagatatatatcttttcagttcccctacgtatctataatcatctgtaggaaatggaagatatttccatttatctactgttcctaatatcatatgtggtggtgtagtagaaccattaagcgcgaaagatgttatttcgcatcgtattttaacttcgcaataatttctggttagataacgcactctaccagtcaagtcaatgatattagcctttacagatatattcatagtagtcgtaacgatgactccatcttttagatgcgatactcctttgtatgtaccagaatcttcgtacctcaaactcgatatatttaaacaagttaatgagatattaacgcgttttatgaatgatgatatataaccagaagttttatcctcggtggctagcgctataaccttatcattataataccaactagtgtgattaatatgtgacacgtcagtgtgggtacaaatatgtacattatcgtctacgtcgtattcgatacatccgcatacagccaacaaatataaaatgacaaatactctaacgccgttcgtacccatcttgatgcggtttaataaatgttttgatttcaatttattgtaaaaaaagattcggttttatactgttcgatattctcattgcttatattttcatctatcatctccacacagtcaaatccgtggttagcatgcacctcatcaaccggtaaaagactatcggactcttctatcattataactctagaatatttaatttggtcattattaatcaagtcaattatcttatttttaacaaacgtgagtattttactcattttttataaaaacttttagaaatatacagactctatcgtgtgtctatatcttctttttatatccaatgtatttatgtctgatttttcttcatttatcatatataatggtccaaattctacacgtgcttcggattcatccagatcattaaggttcttataattgtaacatccttctcttccctcttctacatcttccttcttattcttattcttagcgtcacagaatctaccacagcaggatcccatgacgagcgtcatattaaactaatccattttcaattataatatatgattagtaatgaccattaaaataaaaaatattcttcataaccggcaagaaagtgaaaagttcacattgaaactatgtcagtagtatacatcatgaaatgatgatatatatatactctattttggtggaggattatatgatataattcgtggataatcatttttaagacacatttctttattcgtaaatcttttcacgttaaatgagtgtccatattttgcaatttcttcatatgatggcggtgtacgtggacgaggctgctcctgttcttgttgtggtcgccgactgtcgtgtctgcgtttagatccctccattatcgcgattgcgtagatggagtactattttataccttgtaattaaatttttttattaattaaacgtataaaaacgttccgtatctgtatttaagagccagatttcgtctaatagaacaaatagctacagtaaaaataactagaataattgctacacccactagaaaccacggatcgtaatacggcaatcggttttcgataataggtggaacgtatattttatttaaggacttaacaattgtctgtaaaccacaatttgcttccgcggatcctgtattaactatctgtaaaagcatatgttgaccgggcggagccgaacattctccgatatctaatttctgtatatctataatattattaacctccgcatacgcattacagttcttttctagcttggataccgcactaggtacatcgtctagatctattcctatttcctcagcgatagctcttctatccttttccggaagcaatgaaatcacttcaataaatgattcaaccatgagtgtgaaactaagtcgagaattactcatgcatttgttagttattcggagcgcgcaatttttaaactgtcctataacctctcctatatgaatagcacaagtgacattagtagggatagaatgttgagctaatttttgtaaataactatctataaaaagattatacaaagttttaaactctttagtttccgccatttatccagtctgagaaaatgtctctcataataaatttttccaagaaactaattgggtgaagaatggaaacctttaatctatatttatcacagtctgttttggtacacatgatgaattcttccaatgccgtactaaattcgatatctttttcgatttctggatatgtttttaataaagtatgaacaaagaaatggaaatcgtaataccagttatgtttaactttgaaattgttttttattttcttgttaatgattccagccacttgggaaaagtcaaagtcgtttaatgccgatttaatacgttcattaaaaacaaactttttatcctttagatgaattattattggttcattggaatcaaaaagtaagatattatcgggtttaagatctgcgtgtaaaaagttgtcgcaacagggtagttcgtagattttaatgtataacagagccatctgtaaaaagataaactttatgtattgtaccaaagatttaaatcctaatttgatagctaactcggtatctactttatctgccgaatacagtgctaggggaaaaattataatgtttcctctttcatattcgtagttagttctcttttcatgttcgaaaaagtgaaacatgcggttaaaatagtttataacattaatattactgttaataactgccggataaaagtgggatagtaatttcacgaatttgatactgtcctttctctcgttaaacgcctttaaaaaaactttagaagaatatctcaatgagagttcctgaccatccatagtttgtatcaataatagcaacatatgaagaacacgtttatacagagtatgtaaaaatgttaatttatagtttaatcccatggcccacgcacacacgattaattttttttcatctccctttagattgttgtatagaaatttgggtactgtgaactccgccgtagtttccatgggactatataattttgtggcctcgaatacaaattttactacatagttatctatcttaaagactataccatatcctcctgtagatatgtgataaaaatcgtcgtttataggataaaatcgtttatccttttgttggaaaaaggatgaattaatgtaatcattctcttctatctttagtagtgtttccttattaaaattcttaaaataatttaacaatctaactgacggagcccaattttggtgtaaatctaattgggacattatattgttaaaatacaaacagtctcctaatataacagtatctgataatctatggggagacatccattgatattcaggggatgaatcattggcaacacccatttattgtacaaaaagccccaatttacaaacgaaagtccaggtttgatagagacaaacaattaactattttgtctctgtttttaacacctccacagtttttaatttctttagtaatgaaattattcacaatatcagtatcttctttatctaccagagattttactaacttgataaccttggctgtctcattcaatagggtagtaatatttgtatgtgtgatattgatatctttttgaattgtttcttttagaagtgattctttgatggtgccagcatacgaattacaataatgcagaaactcggttaacatgcaggaattatagtaagccaattccaattgttgcctgtgttgtattagagtgtcaatatgagcaatggtgtccttgcgtttctctgatagaatgcgagcagcgattttggcgttatcatttgacgatatttctggaatgacgaatcctgtttctactaactttttggtaggacaaagtgaaacaatcaagaagatagcttctcctcctatttgtggaagaaattgaactcctctagatgatctactgacgatagtatctccttgacagatattggaccgaattacagaagtacctggaatgtaaagccctgaaaccccctcattttttaagcagattgttgccgtaaatcctgcactatgcccaagatagagagctcctttggtgaatccatctctatgtttcagtttaaccaagaaacagtcagctggtctaaaatttccatctctatctaatacagcatctaacttgatgtcaggaactatgaccggtttaatgttatatgtaacattgagtaaatccttaagttcataatcatcactgtcatcagttatgtacgatccaaacaatgtttctaccggcatagtggatacgaagatgctatccatcagaatgtttccctgattagtattttctatatagctattcttctttaaacgattttccaaatcagtaactatgttcatttttttaggagtaggacgcctagccagtatggaagaggattttctagatcctctcttcaacatctttgatctcgatggaatgcaaaaccccatagtgaaacaaccaacgataaaaataatattgtttttcactttttataattttaccatctgactcatggattcattaatatctttataagagctactaacgtataattctttataactgaactgagatatatacaccggatctatggtttccataattgagtaaatgaatgctcggcaataactaatggcaaatgtatagaacaacgaaattatactagagttgttaaagttaatattttctatgagctgttccaataaattatttgttgtgactgcgttcaagtcataaatcatcttgatactatccagtaaaccgtttttaagttctggaatattatcatcccattgtaaagcccctaattcgactatcgaatatcctgctctgatagcagtttcaatatcgacggacgtcaatactgtaataaaggtggtagtattgtcatcatcgtgataaactacgggaatatggtcgttagtaggtacggtaactttacacaacgcgatatataactttccttttgtaccatttttaacgtagttgggacgtcctgcagggtattgttttgaagaaatgatatcgagaacagatttgatacgatatttgttggattcctgattattcactataatataatctagacagatagatgattcgataaatagagaaggtatatcgttggtaggataatacatccccattccagtattctcggatactctattgatgacactagttaagaacatgtcttctattctagaaaacgaaaacatcctacatggactcattaaaacttctaacgctcctgattgtgtctcgaatgcctcgtacaaggatttcaaggatgccatagattctttgaccaacgatttagaattgcgtttagcatctgatttttttattaaatcgaatggtcggctctctggtttgctaccccaatgataacaatagtcttgtaaagataaaccgcaagaaaatttatacgcatccatccaaataaccctagcaccatcggatgatattaatgtattattatagattttccatccacagttattgggccagtatactgttagcaacggtatatcgaatagattactcatgtaacctactagaatgatagttcgtgtactagtcataatatctttaatccaatctaagaaatttaaaattagattttttacactgttaaagttaacaaaggtattacccggatacgtggatatcatatatggcattggtccattatcagtaatagctccataaactgatacggcgatggtttttatatgtgtttgatctaacgaggaagaaattcgcgcccacaattcatctctagatatgtatttaatatcaaacggtaacacatcaatttcgggacgcgtatatgtttctaaatttttaatccaaatataatgatgacctatatgccctattatcatactgtcaactatagtacacctagagaacttacgatacatctgtttcctgtaatcgttaaattttacaaatctataacatgctaaaccttttgacgacagccattcattaatttctgatatggaatctgtattctcgataccgtatcgttctaaagccagtgctatatctccctgttcgtgggaacgctttcgtataatatcgatcaacggataatctgaagtttttggagaataatatgactcatgatctatttcgtccataaacaatctagacataggaattggaggcgatgatcttaattttgtgcaatgagtcgtcaatcctataacttctaatcttgtaatattcatcatcgacataatactatctatgttatcatcgtatattagtataccatgaccttcttcatttcgtgccaaaatgatatacagtcttaaatagttacgcaatatctcaatagtttcataattgttagctgttttcatcaaggtttgtatcctgtttaacatgatggcgttctataacgtctctattttctatttttaattttttaaatttttaacgatttactgtggctagatacccaatctctctcaaatatttttttagcctcgcttacaagctgtttatctatactattaaaactgacgaatccgtgattttggtaatgggttccgtcgaaatttgccgaagtgatatgaacatattcgtcgtcgactatcaacaattttgtattattctgaatagtgaaaaccttcacagatagatcattttgaacacacaacgcatctagacttttggcggttgccatagaatatacgtcgttcttatcccaattaccaactagaagtctgatcttaactcctctattaatggctgcttctataatggagttgtaaatgtcgggccaatagtagctattaccgtcgacacgtgtagtgggaactatggccaaatgttcaatatctatactagtcttagctgacctgagtttatcaataactacatcggtatctagatctctagaatatcccaataggtgttccggagaatcagtaaagaacactccacctataggattcttaatatgatacgcagtgctaactggcaaacaacaagccgcagagcataaattcaaccatgaattttttgcgctattaaaggctttaaaagtatcaaatcttctacgaagatctgtggccagcgggggataatcagaatatacacctaacgttttaatcgtatgtatagatcctccagtaaatgacgcgtttcctacataacatctttcatcatctgacacccaaaaacaaccgagtagtagtcccacattattttttttatctatattaacggttataaaatttatatccgggcagtgactttgtagctctcccagatttcttttccctcgttcatctagcaaaactattattttaatccctttttcagatgcctcttttagtttatcaaaaataagcgctcccctagtcgtactcagaggattacaacaaaaagatgctatgtatatatatttcttagctagagtgataatttcgttaaaacattcaaatgttgttaaatgatcggatctaaaatccatattttctggtagtgtttctaccagcctacattttgctcccgcaggtaccgatgcaaatggccacatttagttaacataaaaacttatacatcctgttctatcaacgattctagaatatcatcggctatatcgctaaaattttcatcaaagtcgacatcacaacctaactcagtcaatatattaagaagttccatgatgtcatcttcgtctatttctatatccgtatccattgtagattgttgaccgattatcgagtttaaatcattactaatactcaatccttcagaatacaatctgtgtttcattgtaaatttataggcggtgtatttaagttggtagattttcaattatgtattaatatagcaacagtagttcttgctcctccttgattctagcatcctcttcattattttcttctacgtacataaacatgtccaatacgttagacaacacaccgacgatggcggccgctacagacacgaatatgactaaaccgatgaccatttaaaaacccctctctagctttcacttaaactgtatcgatcattcttttagcacatgtataatataaaaacattattctatttcgaatttaggcttccaaaaatttttcatccgtaaaccgataataatatatatagacttgttaatagtcggaataaatagattaatgcttaaactatcatcatctccacgattagagatacaatatttacattctttttgctgtttcgaaactttatcaatacacgttaatacaaacccaggaaggagatattgaaactgaggctgttgaaaatgaaacggtgaatacaataattcagataatgtaaaatcatgattccgtattctgatgatattagaactgctaatggatgtcgatggtatgtatctaggagtatctattttaacaaagcatcgatttgctaatatacaattatccttttgattaattgttattttattcatattcttaaaaggtttcatatttatcaattcttctacattaaaaatttccatttttaatttatgtagccccgcaatactcctcattacgtttcattttttgtctataatatccattttgttcatctcggtacatagattatccaattgagaagcgcatttagtagttttgtacattttaagtttattgacgaatcgtcgaaaactagttatagttaacattttattatttgataccctgatattaatacccctgccgttactattatttataactgatgtaatccacgtaacattggaattaactatcgatagtaatgcatcgacgcttccaaaattgtctattataaactcaccgataatttttttattgcatgttttcatattcattaggattatcaaatctttaatcttattacgattgtatgcgttgatattacaagacgtcattctaaaagacggaggatctccatcaaatgccagacaatcacgtacaaagtacatggaaataggttttgttctattgcgcatcatagatttatatagaacacccgtagaaatactaatttgttttactctataaaatactaatgcatctatttcatcgttttgtataacgtctttccaagtgtcaaattccaaatttttttcattgatagtaccaaattcttctatctctttaactacttgcatagataggtaattacagtgatgcctacatgccgttttttgaaactgaatagatgcgtctagaagcgatgctacgctagtcacaatcaccactttcatatttagaatatatatatgtaaaaatatagtagaatttcattttgtttttttctatgctataaatgaattctcattttgcatctgctcatactccgttttatattaataccaaagaaggaagatatctggttctaaaagccgttaaagtatgcgatgttagaactgtagaatgcgaaggaagtaaagcttcctgcgtactcaaagtagataaaccctcatcgcccgcgtgtgagagaagaccttcgtccccgtccagatgcgagagaatgaataaccctggaaaacaagttccgtttatgaggacggacatgctacaaaatatgttcgcggctaatcgcgataatgtagcttctagacttttgtcctaaaatactattatatccttttcgatattaataaatccgtgtcgtccaggttttttatctctttcagtatgtgaatagataggtattttatctctattcatcatcgaatttaagagatccgataaacattgtttgtattctccagatgtcagcatctgatacaacaatatatgtgcacataaacctctggcacttatttcatgtaccttccccttatcactaaggagaatagtatttgagaaatatgtatacatgatattatcatgaattagatatacagaatttgtaacactctcgaaatcacacgatgtgtcggcgttaagatctaatatatcactcgataacacattttcatctagatacactagacattttttaaagctaaaatagtctttagtagtaacagtaactatgcgattattttcatcgatgatacatttcatcggcatattattacgcttaccatcaaagactataccatgtgtatatctaacgtattctagcatggttgccatacgcgcattaaacttttcaggatctttggatagatcttccaatctatctatttgagaaaacatttttatcatgttcaatagttgaaacgtcggatccactatatagatattatctataaagattttaggaactacgttcatggtatcctggcgaatattaaaactatcaatgatatgattatcgttttcatcttttatcaccatatagtttctaagatatgggattttacttaatataatattatttcccgtgataaattttattagaaaggccaaatctataagaaaagtcctagaattagtctgaagaatatctatatcgccgtatagtatatttggattaattagatatagagaatatgatccgtaacatatacaacttttattatggcgtctaagatattcttccatcaacttattaacatttttgactagggaagatacattatgacgtcccattacttttgccttgtctattactgcgacgttcatagaatttagcatatctcttgccaattcttccattgatgttacattataagaaattttagatgaaattacatttggagctttaatagtaagaactcctaatatgtccgtgtatgtggtcactaatacagattgtagttctataatcgtaaataatttacctatattatatgtttgagtctgtttagaaaagtagctaagtatacgatcttttatttctgatgcagatgtattaacatcggaaaaaaatctttttttattcttttttactaaagatacaaatatgtctttgttaaaaacagttattttctgaatatttctagcttgtaattttaacatatgatattcgttcacactaggtactctgcctaaataggtttctataatctttaatgtaatattaggaaaagtattctgatcaggattcctattcattttgaggatttaaaactctgattattgtctaatatggtctctacgcaaactttttcacagagcgatagagtttttgataactcgtttttcttaagaaatataaaactactgtctccagagctcgctctatcttttattttatctaattcgatacaaactcctgatactggttcagaaagtaattcattaattttcagtcctttatagaagatatttaatatagataatacaaaatcttcagtttttgatatcgatctgattgatcctagaactagatatattaataacgtgctcattaggcagtttatggcagcttgataattagatatagtatattccagttcatatttattagataccgcattgcccagattttgatattctatgaattcctctgaaaataaatccaaaataactagacattctattttttgtggattagtgtactctcttccctctatcatgttcactactggtgtccacgatgataaatatctagagggaatataatatagtccataggatgccaatctagcaatgtcgaataactgtaattttattcttcgctcttcattatgaattgattcttgaggtataaacctaacacaaattatattattagacttttcgtatgtaatgtctttcatgttataagtttttaatcctggaatagaatctattttaatgaggcttttaaacgcagagttctccaacgagtcaaagcataatactctgttgtttttcttatatacgatgttacgattttcttctttgaatggaataggtttttgaattagtttataattacaacataatagataaggaagtgtgcaaatagtacgcggaaaaaacataatagctcccctgttttcatccatggttttaagtaaatgatcactggcttctttagtcaatggatattcgaacattaaccgtttcatcatcattggacagaatccatatttcttaatgtaaagagtgatcaaatcattgtgtttattgtaccatcttgttgtaaatgtgtattcggttatcggatctgctcctttttctattaaagtatcgatgtcgatctcgtctaagaattcaactatatcgacatatttcatttgtatacacataaccattactaacgtagaatgtataggaagagatgtaacgggaacagggtttgttgattcgcaaactattctaatacataattcttctgttaatacgtcttgcacgtaatctattatagatgccaagatatctatataattattttgtaagatgatgttaactatgtgatctatataagtagtgtaataattcatgtatttcgatatatgttccaactctgtctttgtgatgtctagtttcgtaatatctatagcatcctcaaaaaatatattcgcatatattcccaagtcttcagttctatcttctaaaaaatcttcaacgtatggaatataataatctattttacctcttctgatatcattaatgatatagtttttgacactatcttctgtcaattgattcttattcactatatctaagaaacggatagcgtccctaggacgaactactgccattaatatctctattatagcttctggacataattcatctattataccagaattaatgggaactattccgtatctatctaacatagttttaagaaagtcagaatctaagacttgatgttcatatattggttcatacatgaaatgatctctattgatgatagtgactatttcattctctgaaaattggtaactcattctatatatgctttccttgttgatgaaggatagaatatactcaatagaatttgtaccaacaaactgttctcttatgaatcgtatatcatcatctgaaataatcatgtaaggcatacatttaacaattagagacttgtctcctgttatcaatatactattcttgtgataatttatgtgtgaggcaaatttgtccacgttctttaattttgttatagtagatatcaaatccaatggagctacagttcttggcttaaacagatatagtttttctggaacaaattctacaacattattataaaggactttgggtaaataagtgggatgaaatcctattttaattaatgcgatagccttgtcctcgtgcagatatccaaacgcttttgtgatagtatggcattcattgtctagaaacgctctacgaatatctgtgacagatatcatctttagagaatatactagtcgcgttaatagtactacaatttgtattttttaatctatctcaataaaaaaattaatatgtatgattcaatgtataactaaactactaactgttattgataactagaatcagaatctaatgatgacgtacccaagaagtttatctactgccaatttagctgcattatttttagcatctcgtttagattttccatctgccttatcgaatactcttccgtcgatatctacacaggcataaaatgtaggagagttactaggcccaactgattcaatacgaaaagaccaatctctcttagttatttggcagtactcattaataacggtgacagggttagcatctttccaatcaataatttttttagccggaataacatcatcaaaagacttatgatcctctctcattgatttttcgcgggatacatcatctattatgacgtcagccataacatcagcatccggcttatccgcctccgttgtcataaaccaacgaggaggaatatcgtcggagctgtacaccatagcactacgttgaagatcgtacagagctttattaacttctcgcttctccatattaagttgtctagttagttgtgcagcagtagctccttcgattccaatggttttaatagcctcacacacaatctctgcgttagaacgttcgtcgatatagattttagacatttttagagagaactaacacaaccagcaataaaactgaacctactttatcatttttttattcatcatcctctggtggttcgtcgttcctatcaaatgtagctctgattaacccgtcatctataggtgatgctggttctggagattctggaggagatggattattatctggaagaatctctgttatttccttgttttcatgtatcgattgcgttgtaacattaagattgcgaaatgctctaaatttgggaggcttaaagtgttgtttgcaatctctacacgcgtgtctaactagtggaggttcgtcagctgctctagtttgaatcatcatcggcgtagtattcctacttttacagttaggacacggtgtattgtatttctcgtcgagaacgttaaaataatcgttgtaactcacatcctttattttatctatattgtattctactcctttcttaatgcattttataccgaataagagatagcgaaggaattctttttcggtgccgctagtacccttaatcatatcacatagtgttttatattccaaatttgtggcaatagacggtttatttctatacgatagtttgtttctggaatcctttgagtattctataccaatattattctttgattcgaatttagtttcttcgatattagattttgtattacctatattcttgatgtagtactttgatgatttttccatggcccattctattaagtcttccaagttggcatcatccacatattgtgatagtaattctcggatatcagtagcggctaccgccattgatgtttgttcattggatgagtaactactaatgtatacattttccatttataacacttatgtattaactttgttcatttatattttttcattattatgttgatattaacaaaagtgaatatatatatatgttaataattgtattgtggttatacggctacaattttataatgagtgaaagtcagtgtccgatgatcaatgacgatagctttactctgaaaagaaagtatcaaatcgatagtgcggagtcaacaataaaaatggataagaagaggataaagtttcagaatagagccaaaatggtaaaagaaataaatcagacaataagagcagcacaaactcattacgagacattgaaactaggatacataaaatttaagagaatgattaggactactactctagaagatatagcaccatctattccaaataatcagaaaacttataaactattctcggacatttcagccatcggcaaagcatcacagaatccgagtaagatggtatatgctctgctgctttacatgtttcccaatttgtttggagatgatcatagattcattcgttatagaatgcatccaatgagtaaaatcaaacacaagatcttctctcctttcaaacttaatcttattagaatattagtggaagaaagattctataataatgaatgcagatctaataaatggaaaataattggaacacaagttgataaaatgttgatagctgaatctgataaatatacaatagatgcaaggtataacctaaaacccatgtatagaatcaagggagaatctgaagaagataccctcttcatcaaacagatggtagaacaatgtgtgacatcccaggaattggtggaaaaagtgttgaagatactgtttagagatttgttcaagagtggagaatacaaagcgtacagatacgatgatgatgtagaaaatggattcattggattggatacactaaaattaaacattgttcatgatatagttgaaccatgtatgcctgttcgtaggccagtggctaagatactgtgtaaagaaatggtaaataaatactttgagaatccgctacatattattggtaaaaatcttcaagagtgcattgactttgttagtgaataggcatttcatctttctccaatactaattcaaattgttaaattaataatggatagtataaatagttattagttataagatagtaaaaataattattagaataagagtgtagtatcatagataactctcttctataaaaatggattttattcgtagaaagtatcttatatacacagtagaaaataatatagattttttaaaggatgatacattaagtaaagtaaacaattttaccctcaatcatgtactagctctcaagtatctagttagcaattttcctcaacacgttattactaaggatgtattagctaataccaatttttttgttttcatacatatggtacgatgttgtaaagtgtacgaagcggttttacgacacgcatttgatgcacccacgttgtacgttaaagcattgactaagaattatttatcgtttagtaacacaatacaatcgtacaaggaaaccgtgcataaactaacacaagatgaaaaatttttagaggttgccgaatacatggacgaattaggagaacttataggcgtaaattatgacttagttcttaatccattatttcacggaggggaacccatcaaagatatggaaatcatttttttaaaactgtttaagaaaacagacttcaaagttgttaaaaaattaagtgttataagattacttatttgggcatacctaagcaagaaagatacaggcatagagtttgcggataatgatagacaagatatatatactctatttcaacaaactggtagaatcgtccatagcaatctaacagaaacgtttagagattatatctttcccggagataagactagctattgggtgtggttaaacgaaagtatagctaatgatgcggatatcgttcttaatagacacgccattaccatgtatgataaaattcttagttatatatactctgagataaaacaaggacgcgttaataaaaacatgcttaagttagtttatatctttgagcctgaaaaagatatcagagaacttctgctagaaatcatatatgatattcctggagatatcctatctattattgatgcaaaaaacgacgattggaaaaaatattttattagtttttataaagctaattttattaacggtaatacatttattagtgatagaacgtttaacgaggacttattcagagttgttgttcaaatagatcccgaatatttcgataatgaacgaattatgtctttattctctacgagtgctgcggacattaaacgatttgatgagttagatattaataacagttatatatctaatataatttatgaggtgaacgatatcacattagatacaatggatgatatgaagaagtgtcaaatctttaacgaggatacgtcgtattatgttaaggaatacaatacatacctgtttttgcacgagtcggatcccatggtcatagagaacggaatactaaagaaactgtcatctataaaatccaagagtagacggctgaacttgtttagcaaaaacattttaaaatattatttagacggacaattggctcgtctaggtcttgtgttagatgattataaaggagacttgttagttaaaatgataaaccatcttaagtctgtggaggatgtatccgcattcgttcgattttctacagataaaaaccctagtattcttccatcgctaatcaaaactattttagctagttataatatttccatcatcgtcttatttcaaaggtttttgagagataatctatatcatgtagaagaattcttggataaaagcatccatctaaccaagacggataagaaatatatacttcaattgataagacacggtagatcatagaacagaccaaatatattattaataatttggtatatacatagatataattatcacacatttttgataaatgggaactgctgcaacaattcagactcccaccaaattaatgaataaagaaaatgcagaaatgattttggaaaaaattgttgatcatatagttatgtatattagtgacgaatcaagtgattcagaaaataatcctgaatatattgattttcgtaacagatacgaagactatagatctctcattataaaaagtgatcacgagtttgtaaagctatgtaaaaatcatgcggagaaaagttctccagaaacgcaacaaatgattatcaaacacatatacgaacaatatcttattccagtatctgaagtactattaaaacctataatgtccatgggtgacataattacatataacggatgtaaagacaatgaatggatgctagaacaactctctaccctaaactttaacaatctccgcacatggaactcatgtagcataggcaatgtaacgcgtctgttttatacattttttagttatctgatgaaagataaactaaatatataagtataatcccattctaatactttaacctgatgtattagcatcttattagaatattaacctaactaaaagacataacataaaaactcattacatagttgataaaaagcggtaggatataaatattatggctgccaccgttccgcgttttgacgacgtgtacaaaaatgcacaaagaagaattctagatcaagaaacattttttagtagaggtctaagtagaccgttaatgaaaaacacatatctatttgataattacgcgtatggatggataccagaaactgcaatttggagtagtagatacgcaaacttagatgcaagtgactattatcccatttcgttgggattacttaaaaagttcgagtttctcatgtctctatataaaggtcctattccagtatacgaagaaaaagtaaatactgaattcattgctaatggatctttctccggtagatacgtatcatatcttagaaagttttctgctcttccaacaaacgagtttattagttttttgttactgacttccattccaatctataatatcttgttctggtttaaaaatactcagtttgatattactaaacacacattattcagatacgtctatacagataatgccaaacacctggcgttggctaggtatatgtatcaaacaggagactataagcctttgtttagtcgtctcaaagagaattatatatttaccggtcccgttccaatatgtatcaaagatatagatcaccctaatcttagtagagcaagaagtccatccgattatgagacattagctaatattagtactatattgtactttaccaagtatgatccggtattaatgtttttattgttttacgtacctgggtattcaattactacaaaaattactccagccgtagaatatctaatggataaactgaatctaacaaagagcgacgtacaactgttgtaaattattttatgcttcgtaaaatgtaggttttgaaccaaacattctttcaaagaatgagatgcataaaactttattatccaatagattgactatttcggacgtcaatcgtttaaagtaaacttcgtaaaatattctttgatcactgccgagtttaaaacttctatcgataattgtttcatatgttttaatatttacaagttttttggtccatggtccattaggacaaatatatgcaaaataatatcgttctccaagttctatagtctctggattatttttattatattcagtaaccaaatacatattagggttatctgcggatttataatttgagtgatgcattcgactcaacataaataattctagaggagacgatctactatcaaattcggatcgtaaatctgtttctaaagaacggagaatatctatacatacctgattagaattcatccgtccttcagacaacatctcagacagtctggttttgtacatcttaatcatattcttatgaaacttggaaacatctcttctagtttcactagtacctttattaattctctcaggtacagattttgaattcgacgatgctgagtatttcatcgttgtatatttcttcttcgattgcataatcagattcttatataccgcctcaaactctattttaaaattattaaacaatactctattattaatcagtcgttctaactctttcgctatttctatagacttatctacatcttgactgtctatctctgtaaacacggagtcggtatctccatacacgctacgaaaacgaaatctgtaatctataggcaacgatgttttcacaatcggattaatatctctatcgtccatataaaatggattacttaatggattggcaaaccgtaacataccgttagataactctgctccatttagtaccgattctagatacaagatcattctacgtcctatggatgtgcaactcttagccgaagcgtatgagtatagagcactatttctaaatcccatcagaccatatactgagttggctactatcttgtacgtatattgcatggaatcatagatggccttttcagttgaactggtagcctgttttagcatctttttatatctggctctctctgccaaaaatgttcttaatagtctaggaatggttccttctatcgatctatcgaaaattgctatttcagagatgaggttcggtagtctaggttcacaatgaaccgtaatatatctaggaggtggatatttctgaagcaatagctgattatttatttcttcttccaatctattggtactaacaacgacaccgactaatgtttccggagatagatttccaaagatacacacattaggatacagactgttataatcaaagattaatacattattactaaacattttttgttttggagcaaataccttaccgccttcataaggaaacttttgttttgtttctgatctaactaagatagttttagtttccaacaatagctttaacagtggacccttgatgactgtactcgctctatattcgaataccatggattgaggaagcacatatgttgacgcacccgcgtctgtttttgtttctactccataatactcccacaaatactgacacaaacaagcatcatgaatacagtatctagccatatctaaagctatgtttagattataatccttatacatctgagctaaatcaacgtcatcctttccgaaagataatttatatgtatcattaggtaaagtaggacataatagtacgactttaaatccattttcccaaatatctttacgaattactttacatataatatcctcatcaacagtcacataattacctgtggttaaaacctttgcaaatgcagcggctttgcctttcgcgtctgtagtatcgtcaccgatgaacgtcatttctctaactcctctatttaatactttacccatgcaactgaacgcgttcttggatatagaatccaatttgtacgaatccaatttttcaaatttttgaatgaatgaatatagatcgaaaaatatagttccattattgttattaacgtgaaacgtagtattggccatgccgcctactcccttatgactagactgatttctctcataaatacagagatgtacagcttcctttttgtccggagatctaaagataattttctctcctgttaataactctagacgattagtaatatatctcagatcaaagttatgtccgttaaaggtaacgacgtagtcgaacgttagttccaacaattgtttagctattcgtaacaaaactatttcagaacatagaactagttctcgttcgtaatccatttccattagtgactgtatcctcaaacatcctctatcgacggcttcttgtatttcctgttccgttaacatctcttcattaatgagcgtaaacaataatcgtttaccacttaaatcgatataacagtaacttgtatgcgagattgggttaataaatacagaaggaaacttcttatcgaagtgacactctatatctagaaataagtacgatcttgggatatcgaatctaggtatttttttagcgaaacagttacgtggatcgtcacaatgataacatccattgttaatctttgtcaaatattgctcgtccaacgagtaacatccgtctggagatatcccgttagaaatataaaaccaactaatattgagaaattcatccatggtggcattttgtatgctgcgtttctttggctcttctatcaaccacatatctgcgacggagcattttctatctttaatatctagattataacttattgtctcgtcaatgtctatagttctcatctttcccaacggcctcgcattaaatggaggaggagacaatgactgatatatttcgtccgtcactacgtaataaaagtaatgaggaaatcgtataaatacggtctcaccatttcgacatctggatttcagatataaaaatctgttttcaccgtgactttcaaaccaattaatgcaccgaacatccatttatagaatttagaaatatattttcatttaaatgaatcccaaacattggggaagagccgtatggaccattatttttatagtactttcgcaagcgggtttagacggcaacatagaagcgtgtaaacgaaaactatatactatagttagcactcttccatgtcctgcatgtagacggcacgcgactatcgctatagaggacaataatgtcatgtctagcgatgatctgaattatatttattattttttcatcagattatttaacaatttggcatctgatcccaaatacgcgatcgatgtgacaaaggttaaccctttataaacttaacccattataaaacttatgattagtcacaactgaaataaccgcgtgattattttttggtataattctacacggcatggtttctgtgactatgaattcaacccccgttacattagtgaaatctttaacaaacagcaagggttcgtcaaagacataaaactcattgtttacaatcgaaatagaccccctatcacacttaaaataaaaaatatccttatcctttaccaccaaataaaattctgattggtcaatgtgaatgtattcacttaacagttccacaaatttatttattaactccgaggcacatacatcgtcggtattttttatggcaaactttactcttccagcatccgtttctaaaaaaatattaacgagttccatttatatcatccaatattattgaaatgacgttgatggacagatgatacaaataagaaggtacggtacctttgtccaccatctcctccaattcatgctctattttgtcattaactttaatgtatgaaaacagtacgccacatgcttccatgacagtgtgtaacactttggatacaaaatgtttgacattagtataattgttcaagactgtcaatctataatagatagtagctataatatattctatgatggtattgaagaagatgacaaccttggcatattgatcatttaacacagacatggtatcaacagatagcttgaatgaaagagaatcagtaattggaataagcgtcttctcgatagagtgtccgtataccaacatgtctgatattttgatgtattccattaaattatttagttttttctttttattctcgttaaacagcatttctgtcaacggaccccaacatcgttgaccgattaagttttgattgatttttccgtgtaaggcgtatctagtcagatcgtatagcctatccaataatccatcatctgtgcgtagatcacatcgtacactttttaattctctatagaagagcgacagacatctggagcaattacagacagcaatttctttattctctacagatgtaagatacttgaagacattcctatgatgatgcagaattttggataacacggtattgatggtatctgttaccataattcctttgatggctgatagtgtcagagcacaagatttccaatctttgacaatttttagcaccattatctttgttttgatatctatatcagacagcatggtgcgtctgacaacacagggattaagacggaaagatgaaatgattctctcaacatcttcaatagataccttgctattttttctggcattatctatatgtgcgagaatatcctctagagaatcagtatcctttttgatgatagtggatctcaatgacatgggacgtttaaaccttcttattctatcaccagattgcatggtgatttgtcttctttcttttatcataatgtaatctctaaattcatcggcaaattgtctatatctaaaatcataatatgagatgtttacctctacaaatatctgttcgtccaatgttagagtatttacatcagttttgtattccaaattaaacatggcaacggatttaattttatattcctctattaagtcctcgtcgataataacagaatgtagataatcatttaatccatcgtacatggttggaagatgcttgttgacaaaatctttaattgtcttgatgaaggtgggactatatctaacatcttgattaataaaatttataacattgtccataggatactttgtaactagttttatacacatctcttcatcggtaagtttagacagaatatcgtgaacaggtggtatattatattcatcagatatacgaagaacaatgtccaaatctatattgtttaatatattatatagatgtagcgtagctcctacaggaatatctttaactaagtcaatgatttcatcaaccgttagatctattttaaagttaatcatataggcattgatttttaaaaggtatgtagccttgactacattctcattaattaaccattccaagtcactgtgtgtaagaagattatattctatcataagcttgactacatttggtcccgataccattaaagaattcttatgatataaggaaacagcttttaggtactcatctactctacaagaattttggagagccttaacgatatcagtgacgtttattatttcaggaggaaaaaacctaacattgagaatatcggaattaatagcttccagatacagtgattttggcaatagtccgtgtaatccataatccagtaacacgagctggtgcttgctagacaccttttcaatgtttaatttttttgaaataagctttgataaagccttcctcgcaaattccggatacatgaacatgtcggcgacatgattaagtattgttttttcattattttctcaataccccaatagatgatagaatatcacccaatgcgtccatgttgtctatttccaacaggtcgctatatccaccaatagaagtttttccaaaaaagattctaggaacagttctaccaccagtaatttgttcaaaatagtcacgcaattcattttcgggtttaaattctttaatatcgacaatttcatacgctcctcttttgaaactaaacttatttagaatatccagtgcatttctacaaaaaggacatgtatacttgacaaaaattgtcactttgttattggccaacctttgttgtacaaattcctcggccattttaatatttaagtgatataaaactatctcgacttatttaactctttagtcgagatatatggacgcagatagctatatgatagccaactacagaaggcaaacgctataaaaaacataattacgacgagcatatttataaatatttttattcagcattacttgatatagtaatattaggcacagtcaaacattcaaccactctcgatacattaactctctcattttctttaacaaattctgcaatatcttcgtaaaaagattcttgaaactttttagaatatctatcgactctagatgaaatagcgttcgtcaacatactatgttttgtatacataaaggcgcccattttaacagtttctagtgacaaaatgctagcgatcctaggatcctttagaatcacatagattgacgattcgtctctcttagtaactctagtaaaataatcatacaatctagtacgcgaaataatattatccttgacttgaggagatctaaacaatctagttttgagaacatcgataagttcatcgggaatgacatacatactatctttaatagaactcttttcatccagttgaatggattcgtccttaaccaactgattaatgagatcttctattttatcattttccagatgatatgtatgtccattaaagttaaattgtgtagcgcttctttttagtctagcagccaatactttaacatcactaatatcgatatacaaaggagatgatttatctatggtattaagaattcgtttttcgacatccgtcaaaaccaattcctttttgcctgtatcatccagttttccatcctttgtaaagaaattattttctactagactattaataagactgataaggattcctccataattgcacaatccaaactttttcacaaaactagactttacaagatctacaggaatgcgtacttcaggttttttagcttgtgattttttcttttgcggacattttctagtaaccaactcatctaccatttcattgattttagcagtgaaataagctttcaatgcacgggcactgatactattgaaaacgagttgatcttcaaattccgccatttaagttcaccaaacaacttttaaatacaaatatatcaatagtagtagaataagaactataaaaaaaataataattaaccaataccaaccccaacaaccggtattattagttgatgtgactgttttctcatcacttagaacagatttaacaatttctataaagtctgtcaaatcatcttccggagaccccataaatacaccaaatatagcggcgtacaacttatccatttatacattgaatattggcttttctttatcgctatcttcatcatattcatcatcaatatcaacaagtcccagattacgagccagatcttcttctacattttcagtcattgatacacgttcactatctccagagagtccgataacgttagccaccacttctctatcaatgattagtttcttgagcgcgaaagtaatttttgtttccgttccggatctatagaagacgataggtgtgataattgccttagccaattgtctttctcttttactgagtgattctagttcaccttctatagatctgagaatggatgattctccagtcgaaacatattctaccatggatccgtttaatttgttgatgaagatggattcatccttaaatgttttctctgtaatagtttccaccgaaagactatgcaaagaatttggaatgcgttccttgtgcttaatgtttccatagacggcttctagaagttgatacaacataggactagccgcggtaacttttatttttagaaagtatccatcgcttctatcttgtttagatttatttttataaagtttagtctctccttccaacataataaaagtggaagtcatttgactagataaactatcagtaagttttatagagatagacgaacaattagcgtattgagaagcatttagtgtaacgtattcgatacattttgcattagatttactaatcgattttgcatactctataacacccgcacaagtctgtagagaatcgctagatgcagtaggtcttggtgaagtttcaactctcttcttgattaccttactcatgattaaacctaaataattgtactttgtaatataatgatatatattttcactttatctcatttgagaataaaaatgtttttgtttaaccactgcatgatgtacagatttcggaatcgcaaaccaccagtggttttattttatccttgtccaatgtgaattgaatgggagcggatgcgggtttcgtacgtagatagtacattcccgtttttagaccgagactccatccgtaaaaatgcatactcgttagtttggaataactcggatctgctatatggatattcatagattgactttgatcgatgaaggctcccctgtctgcagccatttttatgatcgtcttttgtggaatttcccaaatagttttataaactcgcttaatatcttctggaaggtttgtattctgaatggatccaccatctgccataatcctattcttgatctcatcattccataattttctctcggttaaaactctaaggagatgcggattaactacttgaaattctccagacaatactctccgagtgtaaatattactggtatacggttccaccgactcattatttcccaaaatttgagcagttgatgcagtcggcataggtgccaccaataaactatttctaagaccgtatgttctgattttatcttttagaggttcccaattccaaagatccgacggtacaacattccaaagatcatattgtagaataccgttactggcgtacgatcctacatatgtatcgtatggtccttccttctcagctagttcacaactcgcctctaatgcaccgtaataaatggtttcgaagatcttcttatttagatcttgtgcttccaggctatcaaatggataatttaagagaataaacgcgtccgctaatccttgaacaccaataccgataggtctatgtctcttattagagatttcagcttctggaataggataataattaatatctataattttattgagatttctgacaattactttgaccacatccttcagtttgagaaaatcaaatcgcccatctattacaaacatgttcaaggcaacagatgccagattacaaacggctacctcattagcatccgcatattgtattatctcagtgcaaagattactacacttgatagttcctaaattttgttgattactctttttgttacacgcatccttataaagaatgaatggagtaccagtttcaatctgagattctataatcgctttccagacgactcgagcctttattatagatttgtatctcctttctctttcgtatagtgtatacaatcgttcgaactcgtctccccaaacattgtccaatccaggacattcatccggacacatcaacgaccactctccgtcatccttcactcgtttcataaagagatcaggaatccaaagagctataaatagatctctggttctatgttcctcgtttcctgtattctttttaagatcgaggaacgccataatatcagaatgccacggttccaagtatatggccataactccaggccgtttgtttcctccctgatctatgtatctagcggtgttattataaactctcaacattggaataataccgtttgatataccattggtaccggagatatagcttccactggcacgaatattactaattgatagacctattccccctgccattttagagattaatgcgcatcgttttaacgtgtcatagataccctctatgctatcatcgatcatgttaagtagaaaacagctagacatttggtgacgactagttcccgcattaaataaggtaggagaagcgtgcgtaaaccatttttcagaaagtagattgtacgtctcaatagctgagtctatatcccattgatgaattcctactgcgacacgcattaacatgtgctgaggtctttcaacgatcttgttgtttattttcaacaagtaggatttttccaaagttttaaaaccaaaatagttgtatgaaaagtctcgttcgtaaataataaccgagttgagtttatccttatatttgttaactatatccatggtgatacttgaaataatcggagaatgtttcccatttttaggattaacatagttgaataaatcctccatcacttcactaaatagtttttttgtttccttgtgtagatttgatacggctattctggcggctagaatggcataatccggatgttgtgtagtacaagtggctgctatttcggctgccagagtgtccaattctaccgttgttactccattatatattccttgaataaccttcatagctattttaataggatctatatgatccgtgtttaagccataacataattttctaatacgagacgtgattttatcaaacatgacattttccttgtatccatttcgtttaatgacaaacatttttgttggtgtaataaaaaaattatttaacttttcattaatagggatttgacgtatgtagcgtacaaaatgatcgttcctggtatatagataaagagtcctatatatttgaaaatcgttacggctcgattaaactttaatgattgcatagtgaatatatcattaggatttaactccttgactatcatggcggcgccagaaattaccatcaaaagcattaatacagttatgccgatcgcagttaaaacggttatagcatccaccatttatatctaaaaattagatcaaagaatatgtgacaaagtcctagttgtatactgagaattgacgaaacaatgtttcttacatatttttttcttattagtaactgacttaatagtaggaactggaaagctagacttgattattctataagtatagatacccttccagataatgttctctttgataaaagttccagaaaatgtagaattttttaaaaagttatcttttgctattaccaagattgtgtttagacgcttattattaatatgagtgatgaaatccacaccgcctctagatatcgcctttatttccacattagatggtaaatccaatagtgaaactatctttttaggaatgtatggactcgcgtttagaggagtgaacgtcttgggcgtcggaaaggatgattcgtcaaacgaataaacaatttcacaaatggatgttaatgtattagtaggaaattttttgacgctagtggaattgaagattctaatggatgatgttctacctatttcatccgataacatgttaatttccgacaccaacggttttaatatttcgatgatatacggtagtctctctttcggacttatatagcttattccacaatacgagtcattatatactccaaaaaacaaaataactagtataaaatctgtatcgaatgggaaaaacgaaattatcgacataggtatagaatccggaacattgaacgtattaatacttaattctttttctgtggtaagtaccgataggttattgacattgtatggttttaaatattctataacttgagacttgatagatattagtgatgaattgaaaattatttttatcaccacgtgtgtttcaggatcatcgtcgacgcccgtcaaccaaccgaatggagtaaaataaatatcattaatatatgctctagatattagtatttttattaatcctttgattatcatcttctcgtaggcgaatgattccatgatcaagagtgatttgagaacatcctccggagtattaatgggcttagtaaacagtccatcgttgcaataataaaagttatccaagttaaaggatattatgcattcgtttaaagatatcacctcatctgacggagacaattttttggtaggttttagagactttgaagctacttgtttaacaaagttattcatcgtcgtctactattctatttaattttgtagttaatttatcacatatcacattaattgactttttggtccatttttccatacgtttatattcttttaatcctgcgttatccgtttccgttatatccagggatagatcttgcaagttaaatagaatgctcttaaataatgtcattttcttatccgctaaaaatttaaagaatgtataaacctttttcagagatttgaaactcttaggtggtgtcctagtacacaatatcataaacaaactaataaacattccacattcagattccaacagctgattaacttccacattaatacagcctattttcgctccaaatgtacattcgaaaaatctgaataaaacatcgatgtcacaatttgtattatccaatacagaatgtttgtgattcgtgttaaaaccatcggagaaggaatagaaataaaaattattatagtggtggaattcagttggaatattgcctccggagtcataaaaggatactaaacattgttttttatcataaattacacatttccaatgagacaaataacaaaatccaaacattacaaatctagaggtagaacttttaattttgtctttaagtatatacgataagatatgtttattcataaacgcgtcaaatttttcatgaatcgctaaggagtttaagaatctcatgtcaaattgtcctatataatccacttcggatccataagcaaactgagagactaagttcttaatacttcgattgctcatccaggctcctctctcaggctctattttcatcttgacgacctttggattttcaccagtatgtattcctttacgtgataaatcatcgattttcaaatccatttgtgagaagtctatcgccttagatactttttcccgtagtcgaggtttaaaaaaatacgctaacggtatactagtaggtaactcaaagacatcatatatagaatggtaacgcgtctttaactcgtcggttaactctttcttttgatcgagttcgtcgctactattgggtctgctcaggtgccccgactctactagttccaacatcataccgataggaatacaagacactttgccggcggttgtagatttatcatatttttccactacatatccgttacaatttgttaaaaatttagatacatctatattgctacataatccagctagtgaatatatatgacataataaattggtaaatcctagttctggtattttactaattactaaatctgtatatctttccatttatcatggaaaagaatttaccagatatcttcttttttccaaactgcgttaatgtattctcttacaaatattcacaagatgaattcagtaatatgagtaaaacggaacgtgatagtttctcattggccgtgtttccagttataaaacatagatggcataacgcacacgttgtaaaacataaaggaatatacaaagttagtacagaagcacgtggaaaaaaagtatctcctccatcactaggaaaacccgcacacataaacctaaccgcgaagcaatatatatacagtgaacacacaataagctttgaatgttatagttttctaaaatgtataacaaatacagaaatcaattcgttcgatgagtatatattaagaggactattagaagctggtaatagtttacagatattttccaattccgtaggtaaacgaacagatactataggtgtactagggaataagtatccatttagcaaaattccattggcctcattaactcctaaagcacaacgagagatattttcagcgtggatttctcatagacctgtagttttaactggaggaaccggagtgggtaagacgtcacaggtacccaagttattgctttggtttaattatttatttggtggattctctactctagataaaattactgactttcacgaaagaccagtcattctatctcttcctaggatagctttagttagattgcatagcaataccattttaaaatcattgggatttaaggtactagatggatctcctatttctttacggtacggatctataccggaagaattaataaacaaacaaccaaaaaaatatggaattgtattttctacccataagttatctctaacaaaactatttagttatggcactcttattatagacgaagttcatgagcatgatcaaataggagatattattatagcagtagcgagaaagcatcatacgaaaatagattctatgtttttaatgactgccacattagaggatgaccgagaacggctaaaagtatttttacctaatcccgcatttatacatattcctggagatacactgtttaaaattagcgaggtatttattcataataagataaatccatcttccagaatggcatacatagaagaagaaaagagaaatttagttactgctatacagatgtatactcctcctgatggatcatccggtatagtctttgtggcatccgttgcacagtgtcacgaatataaatcatatttagaaaaaagattaccgtatgatatgtatattattcatggtaaggtcttagatatagacgaaatattagaaaaagtgtattcatcacctaatgtatcgataattatttctactccttatttggaatccagcgttactatacgcaatgttacacacatttatgatatgggtagagtttttgtccccgctccttttggaggatcgcaacaatttatttctaaatctatgagagatcaacgaaaaggaagagtaggaagagttaatcctggtacatacgtctatttctatgatctgtcttatatgaagtctatacagcgaatagattcagaatttctacataattatatattgtacgctaataagtttaatctaacactccccgaagatttgtttataatccctacaaatttggatattctatggcgtacaaaggaatatatagactcgttcgatattagtacagaaacatggaataaattattatccaattattatatgaagatgatagagtatgctaaactttatgtactaagtcctattctcgctgaggagttggataactttgagaggacgggagaattaactagtattgtacgagaagccattttatctctaaatttacgaattaagattttaaattttaaacataaagatgatgatacgtatatacacttttgtaaaatattattcggtgtctataacggaacaaacgctactatatattatcatagacctctaacgggatatatgaatatgatttcagatactatatttgttcctgtagataataactaaaaatcaaactctaatgaccacatctttttttagagatgaaaaattttccacatctccttttgtagacacgactaaacattttgcagaaaaaagtttattagtgtttagataatcgtatacttcatcagtgtagatagtaaatgtgaacagataaaaggtattcttgctcaatagattggtaaattccatagaatatattaatcctttcttcttgagatcccacatcatttcaaccagagacgttttatccaatgatttacctcgtactataccacatacaaaactagattttgcagtgacgtcgtacctggtattcctaccaaacaaaattttacttttagttcttttagaaaattctaaggtagaatctctatttgccaatatgtcatctatggaattaccactagcaaaaaatgatagaaatatatattgatacatcgcagctggttttgatctactatactttaaaaacgaatcagattccataattgcctgtatatcatcagctgaaaaactatgttttacacgtattccttcggcatttctttttaatgatatatcttgtttagacaatgataaagttatcatgtccatgagagacgcgtctccgtatcgtataaatatttcattagatgttagacgcttcattaggggtatacttctataaggtttcttaatcagtccatcattggttgcgtcaagaactactatcggatgttgttgggtatctctagtgttacacatggccttactaaagtttgggtaaataactatgatatctctattaattatagatgcatatatttcattcgtcaaggatattagtatcgacttgctatcgtcattaatacgtgtaatgtaatcatataaatcatgcgatagccaaggaaaatttaaatagatgttcatcatataatcgtcgctataattcatattaatacgttgacattgactaatttgtaatatagcctcgccacgaagaaagctctcgtattcagtttcatcgataaaggataccgttaaatataactggttgccgatagtctcatagtctattaagtggtaagtttcgtacaaatacagaatccctaaaatattatctaatgttggattaatctttaccataactgtataaaatggagacggagtcataactattttaccgtttgtacttactggaatagatgaaggaataatctccggacatgctggtaaagacccaaatgtctgtttgaagaaatccaatgttccaggtcctaatctcttaacaaaaattacgatattcgatcccgatatcctttgcattctatttaccagcatatcacgaactatattaagattatctatcatgtctattctcccaccgttatataaatcgcctccgctaagaaacgttagtatatccatacaatggaatacttcatttctaaaatagtattcgttttctaattctttaatgtgaaatcgtatactagaaagggaaaaattatctttgagttttccgttagaaaagaaccacgaaactaatgttctgattgcgtccgattccgttgctgaattaatggatttacaccaaaaactcatataacttctagatgtagaagcattcgctaaaaaattagtagaatcaaaggatataagtagatgttccaacaagtgagcaattcccaagatttcatctatatcattctcgaatccgaaattagaaattcccaagtagatatcctttttcatccgatcgttgatgaaaatacgaactttattcggtaagacaatcatttactaaggagtaaaataggaagtaatgttcgtatgtcgttatcatcgtataaattaaaggtgtgttttttaccattaagtgacattataattttaccaatattggaattataatataggtgtatttgcgcactcgcgacggttgatgcatcggtaaatatagctgtatctaatgttctagtcggtatttcatcatttcgctgtctaataatagcgttttctctatctgtttccattacagctgcctgaagtttattggtcggataatatgtaaaataataagaaatacatacgaataacaaaaataaaataagatataataaagatgccatttagagatctaattttgtttaacttgtccaaattcctacttacagaagatgaggaatcgttggagatagtgtcttccttatgtagaggatttgaaatatcttataatgacttgataacttactttccagataggaaataccataaatatatttataaagtatttgaacatgtagatttatcggaggaattaagtatggaattccatgatacaactctgagagatttagtctatcttagattgtacaagtattccaagtgtatacggccgtgttataaattaggagataatctaaaaggcatagttgttataaaggacaggaatatttatattagggaagcaaatgatgacttgatagaatatctcctcaaggaatacactcctcagatttatacatattctaatgagcgcgtccccataactggttcaaaattaattctttgtggattttctcaagttacatttatggcgtatacaacgtcgcatataacaacaaataaaaaggtagatgttctcgtttccaaaaaatgtatagatgaactagtcgatccaataaattatcaaatacttcaaaatttatttgataaaggaagcggaacaataaacaaaatactcaggaagatattttattcggtaacaggtggccaaactccataggtagctttttctatttcggattttagaatttccaaattcaccagcgatttatcggttttggtgaaatccaaggatttattaatgtccacaaatgccatttgttttgtctgtggattgtatttgaaaatggaaacgatgtagttagatagatgcgctgcaaagtttcctattagggttccgcgctttacgtcacccagcatacttgaatcaccatcctttaaaaaaaatgataagatatcaacatggagtatatcatactcggattttaattcttctactgcatcactgacattttcacaaatactacaatacggtttaccgaaaataatcagtacgttcttcatttatgggtatcaaaaacttaaaatcgttactgctggaaaataaatcactgacgatattagatgataatttatacaaagtatacaatggaatatttgtggatacaatgagtatttatatagccgtcgccaattgtgtcagaaacttagaagagttaactacggtattcataaaatacgtaaacggatgggtaaaaaagggagggcatgtaaccctttttatcgatagaggaagtataaaaattaaacaagacgttagagacaagagacgtaaatattctaaattaaccaaggacagaaaaatgttagaattagaaaagtgtacatccgaaatacaaaatgttaccggatttatggaagaagaaataaaggcagaaatgcaattaaaaatcgataaactcacatttcaaatatatttatctgattctgataacataaaaatatcattgaatgagatactaacacatttcaacaataatgagaatgttacattattttattgtgatgaacgagacgcagaattcgttatgtgtctcgaggctaaaacacatttctctaccacaggagaatggccgttgataataagtaccgatcaggatactatgctatttgcatctgctgataatcatcctaagatgataaaaaacttaactcaactgtttaaatttgttccctcggcagaggataactatttagcaaaattaacggcgttagtgaatggatgtgatttctttcctggactctatggggcatctataacacccaccaacttaaacaaaatacaattgtttagtgattttacaatcgataatatagtcactagtttggcaattaaaaattattatagaaagactaactctaccgtagacgtgcgtaatattgttacgtttataaacgattacgctaatttagacgatgtctactcgtatattcctccttgtcaatgcactgttcaagaatttatattttccgcattagatgaaaaatggaatgaatttaaatcatcttatttagaaagcgtgccgttaccctgccaattaatgtacgcgttagaaccacgcaaggagattgatgtttcagaagttaaaactttatcatcttatatagatttcgaaaatactaaatcagatatcgatgttataaaatctatatcctcgatcttcggatattctaacgaaaactgtaacacgatagtattcggcatctataaggataatttactactgagtataaataattcattttactttaacgatagtctgttaataaccaatactaaaagtgataatataataaatataggttactagattaaaaatggtgttccaactcgtgtgctctacatgcggtaaagatatttctcacgaacgatataaattgattatacgaaaaaaatcattaaaggatgtactcgtcagtgtaaagaacgaatgttgtaggttaaaattatctacacaaatagaacctcaacgtaacttaacagtgcaacctctattggatataaactaatatggatccggttaattttatcaagacatatgcgcctagaggttctattatttttattaattataccatgtcattaacaagtcatttgaatccatcgatagaaaaacatgtgggtatttattatggtacgttattatcggaacacttggtagttgaatctacctatagaaaaggagttcgaatagtcccattggatagtttttttgaaggatatcttagtgcaaaagtatacatgttagagaatattcaagttatgaaaatagcagctgatacgtcattaactttattgggtattccgtatggatttggtcataatagaatgtattgttttaaattggtagctgactgttataaaaatgccggtattgatacatcgtctaaacgaatattgggcaaagatatttttctgagccaaaacttcacagacgataatagatggataaagatatatgattctaataatttaacattttggcaaattgattaccttaaagggtgagttaatatgcataactactcctccgttgttttttccctcgttctttttcttaacgttgtttgccatcactctcataatgtaaagatattctaaaatggtaaacttttgcatatcggacgcagaaattggtataaatgttgtaattgtattatttcccgtcaatggactagtcacagctccatcagttttatatcctttagagtatttctcactcgtgtctaacattctagagcattccatgatctgtttatcgttgatattggccggaaagatagattttttattttttattatattactattggcaattgtagatataacttctggtaaatatttttctaccttttcaatctcttctattttcaagccggctatatattctgctatattgttgctagtatcaataccttttctggctaagaagtcatatgtggtattcactatatcagttttaactggtagttccattagcctttccacttctgcagaataatcagaaattggttctttaccagaaaatccagctactataataggctcaccgatgatcattggcaaaatcctatattgtaccagattaatgagagcatatttcatttccaataattctgctagttcttgagacattgatttatttgatgaatctagttggttctctagatactctaccatttctgccgcatacaataacttgttagataaaatcagggttatcaaagtgtttagcgtggctagaatagtgggcttgcatgtattaaagaatgcggtagtatgagtaaaccgttttaacgaattatatagtctccagaaatctgtggcgttacatacatgagccgaatgacatcgaagattgtccaatatttttaatagctgctctttgtccattatttctatatttgactcgcaacaattgtagataccattaatcaccgattcctttttcgatgccggacaatagcacaattgtttagctttggactctatgtattcagaattaatagatatatctctcaatacagattgcactatacattttgaaactatgtcaaaaattgtagaacgacgctgttctgcagccatttaactttaaataatttacaaaaatttaaaatgagcatccgtataaaaatcgataaactgcgccaaattgtggcatatttttcagagttcagtgaagaagtgtctataaatgtagactcgacggatgagttaatgtatatttttgccgccttgggcggatctgtaaacatttgggcaattatacctctaagtgcatcagtgttttaccgaggagccgaaaatattgtgtttaatcttcctgtgtccaaggtaaaatcgtgtttgtgtagttttcacaatgatgccatcatagatatagaacctgatctggaaaataatctagtaaaactttctagttatcatgtagtaagtgtcgattgtaacaaggaactgatgcctattaggacagatactactatttgtctaagtatagatcaaaagaaatcttacgtgtttaattttcacaagtatgaagaaaaatgttgtggtagaaccgtcattcatctagaatggttgttgggctttatcaagtgtattagtcagcatcagcatctggctattatgtttaaagatgacaatattattatgaagactcctggtaatactgatgcgttttccagggaatattctatgactgaatgttctcaagaactacaaaagttttctttcaaaatagctatctcgtctctcaacaaactacgaggattcaaaaagagagtcaatgtttttgaaactagaatcgtaatggataatgacgataacattttaggaatgttgttttcggatagagttcaatcctttaagatcaacatctttatggcgtttttagattaatactttcaatgagataaatatgggtggcggagtaagtgttgagctccctaaacgggatccgcctccgggagtacccactgatgagatgttattaaacgtggataaaatgcatgacgtgatagctcccgctaagcttttagaatatgtgcatataggaccactagcaaaagataaagaggataaagtaaagaaaagatatccagagtttagattagtcaacacaggacccggtggtctttcggcattgttaagacaatcgtataatggaaccgcacccaattgctgtcgcacttttaatcgtactcattattggaagaaggatggaaagatatcagataagtatgaagagggtgcagtattagaatcgtgttggccagacgttcacgacactggaaaatgcgatgttgatttattcgactggtgtcagggggatacgttcgatagaaacatatgccatcagtggatcggttcagcctttaataggagtaatagaactgtagagggtcaacaatcgttaataaatctgtataataagatgcaaacattatgtagtaaagatgctagtgtaccaatatgcgaatcatttttgcattatttacgcgcacacaatacagaagatagcaaagagatgatcgattatattctaagacaacagtctgcggactttaaacagaaatatatgagatgtagttatcccactagagataagttagaagagtcattaaaatatgcggaacctcgagaatgttgggatccagagtgttcgaatgccaatgttaatttcttactaacacgtaattataataatttaggactttgcaatattgtacgatgtaataccagcgtgaacaacttacagatggataaaacttcctcattaagattgtcatgtggattaagcaatagtgatagattttctactgttcccgtcaatagagcaaaagtagttcaacataatattaaacactcgttcgacctaaaattgcatttgatcagtttattatctctcttggtaatatggatactaattgtagctatttaaatgggtgccgcggcaagcatacagacgacggtgaatacactcagcgaacgtatctcgtctaaattagaacaagaagcgaacgctagtgctcaaacaaaatgtgatatagaaatcggaaatttttatatccgacaaaaccatggatgtaacctcactgttaaaaatatgtgctctgcggacgcggatgctcagttggatgctgtgttatcagccgctacagaaacatatagtggattaacaccggaacaaaaagcatacgtgccagctatgtttactgctgcgttaaacattcagacgagtgtaaacactgttgttagagattttgaaaattatgtgaaacagacttgtaattctagcgcggtcgtcgataacaaattaaagatacaaaacgtaatcatagatgaatgttacggagccccaggatctccaacaaatttggaatttattaatacaggatctagcaaaggaaattgtgccattaaagcgttgatgcaattgacgactaaggccactactcaaatagcacctagacaagttgctggtacaggagttcagttttatatgattgttatcggtgttataatattggcagcgttgtttatgtactatgccaagcgtatgttgttcacatccaccaatgataaaatcaaacttattttagccaataaggaaaacgtccattggactacttacatggacacattctttagaacttctccgatggttattgctaccacggatatgcaaaactgaaaatatattgataatattttaatagattaacatggaagttatcgctgatcgtctagacgatatagtgaaacaaaatatagcggatgaaaaatttgtagattttgttatacacggtctagagcatcaatgtcctgctatacttcgaccattaattaggttgtttattgatatactattatttgttatagtaatttatatttttacggtacgtctagtaagtagaaattatcaaatgttgttggtggtgctagtcatcacattaactattttttattactttatactataatagtactagactgacttctaacaaacatctcacctgccataaataaatgcttgatattaaagtcttctatttctaacactattccatctgtggaaaataatactctgacattatcgctaattgacacatcggtgagtgatatgcctataaagtaataatcttctttgggcacatataccagtgtaccaggttctaacaacctatttactggtgctcctgtagcatactttttctttaccttgagaatatccatcgtttgcttggtcaatagcgatatgtgattttttatcaaccactcaaaaaagtaattggagtgttcatatcctctacgggctattgtctcatggccgtgtatgaaatttaagtaacacgactgtggtagatttgttctatagagccgattgccgcaaatagatagaactaccaatatgtctgtacaaatgttaaacattaattgattaacagaaaaaacaatgttcgttctgggaatagaaaccagatcaaaacaaaattcgttagaatatatgccacgtttatacatggaatataaaataactacagtttgaaaaataacagtatcatttaaacatttaacttgcggggttaatctcacaactttactgtttttgaactgttcaaaatatagcatcgatccgtgagaaatacgtttagccgcctttaatagaggaaatcccaccgcctttctggatctcaccaacgacgatagttctgaccagcaactcatttcttcatcatccacctgttttaacatataataggcaggagatagatatccgtcattgcaatattccttctcgtaggcacacaatctaatattgataaaatctccattctcttctctgcatttattatcttgtctcggtggctgattaggctgtggtcttggtttaggccttggtctatcgttgttgaatctattttggtcattaaatctttcatttcttcctggtatatttttatcacctcgtttggttggatttttgtctatattatcgtttgtaacatcggtacgggtattcatttatcacaaaaaaaacttctctaaatgagtctactgctagaaaacctcatcgaagaagataccatattttttgcaggaagtatatctgagtatgatgatttacaaatggttattgccggcgcaaaatccaaatttccaagatctatgctttctatttttaatatagtacctagaacgatgtcaaaatatgagttggagttgattcataacgaaaatatcacaggagcaatgtttaccacaatgtataatataagaaacaatttgggtctaggagatgataaactaactattgaagccattgaaaactatttcttggatcctaacaatgaagttatgcctcttattattaataatacggatatgactgccgtcattcctaaaaaaagtggtaggagaaagaataagaacatggttatcttccgtcaaggatcatcacctatcttgtgcattttcgaaactcgtaaaaagattaatatttataaagaaaatatggaatccgcgtcgactgagtatacacctatcggagacaacaaggctttgatatctaaatatgcgggaattaatgtcctgaatgtgtattctccttccacatccataagattgaatgccatttacggattcaccaataaaaataaactagagaaacttagtactaataaggaactagaatcgtatagttctagccctcttcaagaacccattaggttaaatgattttctgggactattggaatgtgttaaaaagaatattcctctaacagatattccgacaaaggattgattactataaatggagaatgttcctaatgtatactttaatcctgtgtttatagagcccacgtttaaacattctttattaagtgtttataaacacagattaatagttttatttgaagtattcgttgtattcattctaatatatgtattttttagatctgaattaaatatgttcttcatgcctaaacgaaaaatacccgatcctattgatagattacgacgtgctaatctagcgtgtgaagacgataaattaatgatctatggattaccatggatgacaactcaaacatctgcgttatcaataaatagtaaaccgatagtgtataaagattgtgcaaagcttttgcgatcaataaatggatcacaaccagtatctcttaacgatgttcttcgcagatgatgattcattttttaagtatttggctagtcaagatgatgaatcttcattatctgatatattgcaaatcactcaatatctagactttctgttattattattgatccaatcaaaaaataaattagaagctgtgggtcattgttatgaatctctttcagaggaatacagacaattgacaaaattcacagactttcaagattttaaaaaactgtttaacaaggtccctattgttacagatggaagggtcaaacttaataaaggatatttgttcgactttgtgattagtttgatgcgattcaaaaaagaatcctctctagctaccaccgcaatagatcctgttagatacatagatcctcgtcgtgatatcgcattttctaacgtgatggatatattaaagtcgaataaagtgaacaataattaattctttattgtcatcatgaacggcggacatattcagttgataatcggccccatgttttcaggtaaaagtacagaattaattagacgagttagacgttatcaaatagctcaatataaatgcgtgactataaaatattctaacgataatagatacggaacgggactatggacgcatgataagaataattttgaagcattggaagcaactaaactatgtgatgtcttggaatcaattacagatttctccgtgataggtatcgatgaaggacagttctttccagacattgtttaattctgtgagcgtatggcaaacgaaggaaaaatagttatagtagccgcactcgatgggacatttcaacgtaaaccgtttaataatattttgaatcttattccattatctgaaatggtggtaaaactaactgctgtgtgtatgaaatgctttaaggaggcttccttttctaaacgattgggtgaggaaaccgagatagagataataggaggtaatgatatgtatcaatcggtgtgtagaaagtgttacgtcggctcataatattatattttttatctaaaaaactaaaaataaacattgattaaattttaatataatacttaaaaatggatgttgtgtcgttagataaaccgtttatgtattttgaggaaattgataatgagttagattacgaaccagaaagtgcaaatgaggtcgcaaaaaaactgccgtatcaaggacagttaaaactattactaggagaattattttttcttagtaagttacagcgacacggtatattagatggtgccaccgtagtgtatataggatcggctcctggtacacatatacgttatttgagagatcatttctataatttaggagtgatcatcaaatggatgctaattgacggccgccatcatgatcctattttaaatggattgcgtgatgtaactctagtgactcggttcgttgatgaggaatatctacgatccatcaaaaaacaactgcatccttctaagattattttaatttctgatgtgagatccaaacgaggaggaaatgaacctagtacggcggatttactaagtaattacgctctacaaaatgtcatgattagtattttaaaccccgtggcgtctagtcttaaatggagatgcccgtttccagatcaatggatcaaggacttttatatcccacacggtaataaaatgttacaaccttttgctccttcatattcagctgaaatgagattattaagtatttataccggtgagaacatgagactgactcgagttaccaaattagacgctgtaaattatgaaaaaaagatgtactaccttaataagatcgtccgtaacaaagtagttgttaactttgattatcctaatcaggaatatgactattttcacatgtactttatgctgaggaccgtgtactgcaataaaacatttcctactactaaagcaaaggtactatttctacaacaatctatatttcgtttcttaaatattccaacaacatcaactgaaaaagttagtcatgaaccaatacaacgtaaaatatctagcaaaaattctatgtctaaaaacagaaatagcaagagatccgtacgcggtaataaatagaaacgtactactgagatatactaccgatatagagtataatgatttagttactttaataaccgttagacataaaattgattctatgaaaactgtgtttcaggtatttaacgaatcatccataaattatactccggttgatgatgattatggagaaccaatcattataacatcgtatcttcaaaaaggtcataacaagtttcctgtaaattttctatacatagatgtggtaatatctgacttatttcctagctttgttagactagatactacagaaactaatatagttaatagtgtactacaaacaggcgatggtaaaaagactcttcgtcttcccaaaatgttagagacggaaatagttgtcaagattctctatcgccctaatataccattaaaaattgttagatttttccgcaataacatggtaactggagtagagatagccgatagatctgttatttcagtcgctgattaatcaattagtagagatgagataagaacattataataatcaataatatatcttatatcttatatcttatatcttatatcttgtttagaaaaatgctaatattaaaatagctaacgctagtaatccaatcggaagccatttgatatctataatagggtatctaatttcctgatttaaatagcggacagctatattctcggtagctactcgtttggaatcacaaacattatttacatctaatttactatctgtaatggaaacgtttcccaatgaaatggtacaatccgatacattgcattttgttatatttttttttaaagaggctggtaacaacgcatcgcttcgtttacatggctcgtaccaacaataatagggtaatcttgtatctattcctatccgtactatgcttttatcaggataaatacatttacatcgtatatcgtctttgttagcatcacagaatgcataaatttgttcgtccgtcatgataaaaatttaaagtgtaaatataactattatttttatagttgtaataaaaagggaaatttaattgtatactttcggttctttaaaagaaactgacttgataaaaatggctgtaatctctaaggttacgtatagtctatatgatcaaaaagagattaatgctacagatattatcattagtcatgttaaaaatgacgacgatatcggtaccgttaaagatggtagactaggtgctatggatggggcattatgtaagacttgtgggaaaacggaattggaatgtttcggtcactggggtaaagtaagtatttataaaactcatatagttaagcctgaatttatttcagaaattattcgtttactgaatcatatatgtattcactgcggattattgcgttcacgagaaccgtattccgacgatattaacctaaaagagttatcgggacacgctcttaggagattaaaggataaaatattatccaagaaaaagtcatgttggaacagtgaatgtatgcaaccgtatcaaaaaattactttttcaaagaaaaaggtttgtttcgtcaacaagttggatgatattaacgttcctaattctctcatctatcaaaagttaatttctattcatgaaaagttttggccattattagaaattcatcaatatccagctaacttattttatacagactactttcccatccctccgttgattattagaccggctattagtttttggatagatagtatacccaaagagaccaatgaattaacttacttattaggtatgatcgttaagaattgtaacttgaatgctgatgaacaggttatccagaaggcggtaatagaatacgatgatattaaaattatttctaataacactaccagtatcaatttatcatatattacatccggcaaaaataatatgattagaagttatatcgtcgcccgacgaaaagatcagaccgctagatctgtaattggtcccagtacatctatcaccgttaatgaggtaggaatgcccgcatatattagaaatacacttacagaaaagatatttgttaatgcctttacagtggataaagttaaacaactattagcgtcaaaccaagttaaattttactttaataaacgattaaaccaattaacaagaatacgccaaggaaagtttattaaaaataaaatacatttattgcctggtgattgggtagaagtagctgttcaagaatatacaagtattatttttggaagacagccgtctctacatagatacaacgtcatcgcttcatctatcagagctaccgaaggagatactatcaaaatatctcccggaattgccaactctcaaaatgctgatttcgacggggatgaggaatggatgatattagaacaaaatcctaaagctgtaattgaacaaagtattcttatgtatccgacgacgttactcaaacacgatattcatggagcccccgtttatggatctattcaagatgaaatcgtagcagcgtattcattgtttaggatacaagatctttgtttagatgaagtattgaacatcttggggaaatatggaagagagttcgatcctaaaggtaaatgtaaattcagcggtaaagatatctatacttacttgataggtgaaaagattaattatccgggtctcttaaaggatggtgaaattattgcaaacgacgtagatagtaattttgttgtggctatgaggcatctgtcattggctggactcttatccgatcataagtcgaacgtggaaggtatcaactttattatcaagtcatcttatgtttttaagagatatctatctatttacggttttggggtgacattcaaagatctgagaccaaattcgacgttcactaataaattggaggccatcaacgtagaaaaaatagaacttatcaaagaagcatacgccaaatatctcaacgatgtaagagacgggaaaatagttccattatctaaagctttagaggcggactatgtggaatccatgttatccaacttgacaaatcttaatatccgagagatagaagaacatatgagacaaacgctgatagatgatccagataataacctcctgaaaatggccaaagcgggttataaagtaaatcccacagaactaatgtatattctaggtacgtatggacaacaaaggattgatggtgaaccagcagagactcgagtattgggtagagttttaccttactatcttccagactctaaggatccagaaggaagaggttatattcttaattctttaacaaaaggattaacgggttctcaatattacttttcgatgctggttgcaagatctcaatctactgatatcgtctgtgaaacatcacgtaccggaacactggctagaaaaatcattaaaaagatggaggatatggtggtcgacggatacggacaagtagttataggtaatacgctcatcaagtacgccgccaattataccaaaattctaggctcagtatgtaaacctgtagatcttatctatccagatgagtccatgacttggtatttggaaattagtgctctgtggaataaaataaaacagggattcgtttactctcagaaacagaaacttgcaaagaagacattggcgccgtttaatttcctagtattcgtcaaacccaccactgaggataatgctattaaggttaaggatctgtacgatatgattcataacgtcattgatgatgtgagagagaaatacttctttacggtatctaatatagattttatggagtatatattcttgacgcatcttaatccttctagaattagaattacaaaagaaacggctatcactatctttgaaaagttctatgaaaaactcaattatactctaggtggtggaactcctattggaattatttctgcacaggtattgtctgagaagtttacacaacaagccctgtccagttttcacactactgaaaaaagtggtgccgtcaaacaaaaacttggtttcaacgagtttaataacttgactaatttgagtaagaataagaccgaaattatcactctggtatccgatgatatctctaaacttcaatctgttaagattaatttcgaatttgtatgtttgggagaattaaatccagacatcactcttcgaaaagaaacagataggtatgtagtagatataatagtcaatagattatacatcaagagagcagaaataaccgaattagtcgtcgaatatatgattgaacgatttatctcctttagcgtcattgtaaaggaatggggtatggaaacattcattgaggatgaggataatattagatttactgtctacctaaatttcgttgaaccggaagaattgaatcttagtaagtttatgatggttcttccgggtgccgccaacaagggaaagattagtaaattcaagattcctatctctgactatacgggttatgacgacttcaatcaaacaaaaaagctcaataagatgactgtagaactcatgaatctaaaagaattgggttctttcgatttggaaaacgtcaacgtgtatcctggagtatggaatacatacgatatcttcggtatcgaggccgctcgtgaatacttgtgcgaagccatgttaaacacctatggagaagggttcgattatctgtatcagccttgtgatcttctcgctagtttactatgtgctagttacgaaccagaatcagtgaataaattcaagttcggcgcagctagtactcttaagagagctacgttcggagacaataaagcattgttaaacgcggctcttcataaaaagtcagaacctattaacgataatagtagctgccacttttttagcaaggtccctaatataggaactggatattacaaatactttatcgacttgggtcttctcatgagaatggaaaggaaactatctgataagatatcttctcaaaagatcaaggaaatggaagaaacagaagacttttaattcttatcaataacatatttttctatgatctgtcttttaaacgatggattttccacaaatgcgcctctcaagtccctcatagaatgatacacgtataaaaaatatagcataggcaatgactccttatttttagacattagatatgccaaaatcatagccccgcttctatttactcccgcagcacaatgaaccaacacgggctcgtttcgttgatcacatttagataaaaaggcggttacgtcgtcaaaatatttactaatatcggtagttgtatcatctaccaacggtatatgaataatattaatattagagttaggtaatgtatatttatccatcgtcaaatttaaaacatatttgaacttaacttcagatgatggtgcatccatagcatttttataatttcccaaatacacattattggttacccttgtcattatagtgggagatttggctttgtgcatatctccagttgaacgtagtagtaagtatttatacaaacttttcttatccatttataacgtacaaatggataaaactactttatcggtaaacgcgtgtaatttagaatacgttagagaaaaggctatagtaggcgtacaagcagccaaaacatcaacacttatattctttgttattatattggcaattagtgcgctattactctggtttcagacgtctgataatccagtctttaatgaattaacgagatatatgcgaattaaaaatacggttaacgattggaaatcattaacggatagcaaaacaaaattagaaagtgatagaggtagacttctagccgctggtaaggatgatatattcgacttcaaatgtgtggatttcggcgcctattttatagctatgcgattggataagaaaacatatctgccgcaagctattaggcgaggtactggagacgcgtggatggttaaaaaggcggcaaaggtcgatccatctgctcaacaattttgtcagtatttgataaaacacaagtctaataatgttattacttgtggtaatgagatgttaaatgaattaggttatagcggttattttatgtcaccgcattggtgttccgattttagtaatatggaatagtgttagataaatgcggtaacgaatgttcctgtaaggaaccataacagcttagatttaacgttaaagatgagcataaacataataaacaaaattacaatcaaacttataacattaatatcaaacaatccaaaaaatgaaatcagtggagtagtaaacgcgtacataactcctggataacgtttagcagctgccgttcctattctagaccaaaaatttggtttcatgttttcgaaacggtattctgcaacaagtcggggatcgtgttctacatatttggcggcattatccagtatctgcctattgatcttcatttcgttttcgattctggctatttcaaaataaaatcccgatgatagacctccagactttataatttcatctacgatgttcagcgccgtagtaactctaataatataggctgataagctaacatcataccctcctgtatatgtgaatatggcatgatttttgtccattacaagctcggttttaactttattgcctgtaataatttctctcatctgtaggatatctatttttttgtcatgcattgccttcaagacgggacgaagaaacgtaatatcctcaataacgttatcgttttctacaataactacatattctacctttttattttctaactcggtaaaaaaattagaatcccatagggctaaatgtctagcgatatttcttttcgtttcctctgtacacatagtgttacaaaaccctgaaaagaagtgagtatacttgtcatcatttctaatgtttcctccagtccactgtataaacgcataatccttgtaatgatctggatcatccttgactaccacaacatttcttttttctggcataacttcgttgtcctttacatcatcgaacttctgatcattaatatgctcatgaacattaggaaatgtttctgatggaggtctatcaataactggcacaacaataacaggagttttcaccgccgccatttagttattgaaattaatcatatacaactctttaatacgagttatattttcgtctatccattgtttcacatttacatatttcgacaaaaagatataaaatgcgtattccaatgcttctctgtttaatgaattactaaaatatacaaacacgtcactgtctggcaataaatgatatcttagaatattgtaacaatttattttgtattgcacatgttcgtgatctatgagttcttcttcgaatggcataggatctccgaatctgaaaacgtataaataggagttagaataataatatttgagagtattggtaatatataaactctttagcggtataattagtttttttctctcaatttctatttttagatgtgatggaaaaatgactaattttgtagcattagtatcatgaactctaatcaaaatcttaatatcttcgtcacacgttagctctttgaagtttttaagagatgcatcagttggttctacagatggagtaggtgcaacaattttttgttctacacatgtatgtactggagccattgttttaactataatggtgcttgtatcgaaaaactttaatgcagatagcggaagctcttcgccgcgactttctacgtcgtaattgggttctaacgccgatctctgaatggatactagttttctaagttctaatgtgattctctgaaaatgtaaatccaattcctccggcattatagatgtgtatacatcggtaaataaaactatagtatccaacgatcccttctcgcaaattctagtcttaaccaaaaaatcgtatataaccacggagatggcgtatttaagagtggattcttctaccgttttgttcttggatgtcatataggaaactataaagtccgcactactgttaagaatgattactaacgcaactatatagttcaaattaagcattttggaaacataaaataactctgtagacgatacttgactttcgaataagtttgcagacaaacgaagaaagaacagacctctcttaatttcagaagaaaactttttttcgtattcctgacgtctagagtttatatcaataagaaagttaagaattagtcggttaatgttgtatttcattacccaagtttgagatttcataatattatcaaaagacatgataatattaaagataaagcgctgactatgaacgaaatagctatatggttcgctcaagaatatagtcttgttaaacgtggaaacgataactgtatttttaatcacgtcagcggcatctaaattaaatataggtatatttattccacacactctacaatatgccacaccatcttcataataaataaattcgttagcaaaattattaattttagtgaaatagttagcgtcaactttcatagcttccttcaatctaatttgatgctcacacggtgcgaattccactctaacatcccttttccatgcctcaggttcatcgatctctataatatctagttttttgcgtttcacaaacacaggctcgtctctcgcgatgagatctgtatagtaactatgtaaatgataactagatagaaagatgtagctatatagatgacgatcctttaagagaggtataataactttaccccaatcagatagactgttgttatggtcttcggaaaaagaatttttataaatttttccagtattttccaaatatacgtacttaacatctaaaaaatccttaatgataataggaatggataatccgtctattttataaagaaatacatatcgcacattatacttttttttggaaatgggaataccgatgtgtctacataaatatgcaaagtctaaatattttttagagaatcttagttggtccaaattcttttccaagtacggtaatagatttttcatattgaacggtatcttcttaatctctggttctagttccgcattaaatgatgaaactaagtcactatttttataactaacgattacatcacctctaacatcatcatttaccagaatactgatcttcttttgtcgtaaatacatgtctaatgtgttaaaaaaaagatcatacaagttatacgtcatttcatctgtggtattcttgtcattgaaggataaactcgtactaatctcttctttaacagcctgttcaaatttatatcctatatacgaaaaaatagcaaccagtgtttgatcatccgcgtcaatattctgttctatcgtagtgtataacaatcgtatatcttcttctgtgatagtcgatacgttataaaggttgataacgaaaatatttttatttcgtgaaataaagtcatcgtaggattttggacttatattcgcgtctagtagatatgcttttatttttggaatgatctcaattagaatagtctctttagagtccatttaaagttacaaacaactaggaaattggtttatgatgtataatttttttagtttttatagattctttattctatacttaaaaaatgaaaataaatacaaaggttcttgagggttgtgttaaattgaaagcgagaaataatcataaattatttcattatcgcgatatccgttaagtttgtatcgtaatggcgtggtcaattacgaataaagcggatactagtagcttcacaaagatggctgaaatcagagctcatctaaaaaatagcgctgaaaataaagataaaaacgaggatattttcccggaagatgtaataattccatctactaagcccaaaaccaaacgagccactactcctcgtaaaccagcggctactaaaagatcaaccaaaaaggaggaagtggaagaagaagtagttatagaggaatatcatcaaacaactgaaaaaaattctccatctcctggagtcagcgacattgtagaaagcgtggccgctgtagagctcgatgatagcgacggggatgatgaacctatggtacaagttgaagctggtaaagtaaatcatagtgctagaagcgatctctctgacctaaaggtggctaccgacaatatcgttaaagatcttaagaaaattattactagaatctctgcagtatcgacggttctagaggatgttcaagcagctggtatctctagacaatttacttctatgactaaagctattacaacactatctgatctagtcaccgagggaaaatctaaagttgttcgtaaaaaagttaaaacttgtaagaagtaaatgcgtgcacttttttataaagatggtaaactctttaccgataataattttttaaatcctgtatcagacgataatccagcgtatgaggttttgcaacatgttaaaattcctactcatttaacagatgtagtagtatatgaacaaacgtgggaggaggcgttaactagattaatttttgtgggaagcgattcaaaaggacgtagacaatacttttacggaaaaatgcatgtacagaatcgcaacgctaaaagagatcgtatttttgttagagtatataacgttatgaaacgaattaattgttttataaacaaaaatataaagaaatcgtccacagattccaattatcagttggcggtttttatgttaatggaaactatgttttttattagatttggtaaaatgaaatatcttaaggagaatgaaacagtagggttattaacactaaaaaataaacacatagaaataagtcccgatgaaatagttatcaagtttgtaggaaaggacaaagtttcacatgaatttgttgttcataagtctaatagactatataaaccgctattgaaactgacggatgattctagtcccgaagaatttctgttcaacaaactaagtgaacgaaaggtatatgaatgtatcaaacagtttggtattagaatcaaggatctccgaacgtatggagtcaattatacgtttttatataatttttggacaaatgtaaagtccatatctcctcttccatcaccaaaaaagttaatagcattaactatcaaacaaactgctgaagtggtaggtcatactccatcaatttcaaaaagagcttatatggcaacgactattttagaaatggtaaaggataaaaattttttagatgtagtatctaaaactacgttcgatgaattcctatctatagtcgtagatcacgttaaatcatctacggatggatgatatagatctttacacaaataattacaagaccgataaatggaaatggataagcgtatgaaatctctcgcaatgacagctttcttcggagagctaagcacattagatattatggcattgataatgtctatatttaaacgccatccaaacaataccattttttcagtggataaggatggtcagtttatgattgatttcgaatacgataattataaggcttctcaatatttggatctgaccctcactccgatatctggagatgaatgcaagactcacgcatcgagtatagccgaacaattggcgtgtgtggatattattaaagaggatattagcgaatatatcaaaactactccccgtcttaaacgatttataaaaaaataccgcaatagatcagatactcgcatcagtcgagatacagaaaagcttaaaatagctctagctaaaggcatagattacgaatatataaaagacgcttgttaataagtaaatgaaaaaaaactagtcgtttataataaaacacgatatggatgccaacgtagtatcatcttctactattgcgacgtatatagacgctttagcgaagaatgcttcagaattagaacagaggtctaccgcatacgaaataaataatgaattggaactagtatttattaagccgccattgattactttgacaaatgtagtgaatatctctacgattcaggaatcgtttattcgatttaccgttactaataaggaaggtgttaaaattagaactaagattccattatctaaggtacatggtctagatgtaaaaaatgtacagttagtagatgctatagataacatagtttgggaaaagaaatcattagtgacggaaaatcgtcttcacaaagaatgcttgttgagactatcgacagaggaacgtcatatatttttggattacaagaaatatggatcctctatccgactagaattagtcaatcttattcaagcaaaaacaaaaaactttacgatagactttaagctaaaatattttctaggatccggtgcccaatctaaaagttctttgttgcacgctattaatcatccaaagtcaaggcctaatacatctctggaaatagaattcacacctagagacaatgaaacagttccatatgatgaactaataaaggaattgacgactctctcgcgtcatatatttatggcttctccagagaatgtaattctttctccgcctattaacgcgcctataaaaacctttatgttgcctaaacaagatatagtaggtttggatctggaaaatctatatgccgtaactaagactgacggcattcctataactatcagagttacatcaaacgggttgtattgttattttacacatcttggttatattattagatatcctgttaagagaataatagattccgaagtagtagtctttggtgaggcagttaaggataagaactggaccgtatatctcattaagctaatagagcctgtgaatgcaatcaatgatagactagaagaaagtaagtatgttgaatctaaactagtggatatttgtgatcggatagtattcaagtcaaagaaatacgaaggtccgtttactacaactagtgaagtcgtcgatatgttatctacatatttaccaaagcaaccagaaggtgttattctgttctattcaaagggacctaaatctaacattgattttaaaattaaaaaggaaaatactatagaccaaactgcaaatgtagtatttaggtacatgtccagtgaaccaattatctttggagaatcgtctatctttgtagagtataagaaatttagcaacgataaaggctttcctaaagaatatggttctggtaagattgtgttatataacggcgttaattatctaaataatatctattgtttggaatatattaatacacataatgaagtgggtattaagtccgtggttgtacctattaagtttatagcagaattcttagttaatggagaaatacttaaacctagaattgataaaaccatgaaatatattaactcagaagattattatggaaatcaacataatatcatagtcgaacatttaagagatcaaagcatcaaaataggagatatctttaacgaggataaactatcggatgtgggacatcaatacgccaataatgataaatttagattaaatccagaagttagttattttacgaataaacgaactagaggaccgttgggaattttatcaaactacgtcaagactcttcttatttctatgtattgttccaaaacatttttagacgattccaacaaacgaaaggtattggcgattgattttggaaacggtgctgacctggaaaaatacttttatggagagattgcgttattggtagcgacggatccggatgctgatgctatagctagaggaaatgaaagatacaacaaattaaactctggaattaaaaccaagtactacaaatttgactacattcaggaaactattcgatccgatacatttgtctctagtgtcagagaagtattctattttggaaagtttaatatcatcgactggcagtttgctatccattattcttttcatccgagacattatgctaccgtcatgaataacttatccgaactaactgcttctggaggcaaggtattaatcactaccatggacggagacaaattatcaaaattaacagataaaaagacttttataattcataagaatttacctagtagcgaaaactatatgtctgtagaaaaaatagctgatgatagaatagtggtatataatccatcaacaatgtctactccaatgactgaatacattatcaaaaagaacgatatagtcagagtgtttaacgaatacggatttgttcttgtagataacgttgatttcgctacaattatagaacgaagtaaaaagtttattaatggcgcatctacaatggaagatagaccgtctacaaaaaactttttcgaactaaatagaggagccattaaatgtgaaggtttagatgtcgaagacttacttagttactatgttgtttatgtcttttctaagcggtaaataataatatggtatgggttctgatatccccgttctaaatgcattaaataattccaatagagcgatttttgttcctataggaccttccaactgtggatactctgtattgttaatagatatattaatacttttgtcgggtaacagaggttctacgtcttctaaaaataaaagttttataacatctggcctgttcataaataaaaacttggcgattctatatatactcttattatcaaatctagccattgtcttatagatgtgagctactgtaggtgtaccatttgattttctttctaatactatatatttctctcgaagaagttcttgcacatcatctgggaataaaatactactgttgagtaaatcagttattttttttatatcgatattgatggacatttttatagttaaggataataagtatcccaaagtcgataacgacgataacgaagtatttatacttttaggaaatcacaatgactttatcagattaaaattaacaaaattaaaggagcatgtatttttttctgaatatattgtgactccagatacatatggatctttatgcgtcgaattaaatgggtctagttttcagcacggtggtagatatatagaggtggaggaatttatagatgctggaagacaagttagatggtgttctacatccaatcatatatctaaagatatacccgaagatatgcacactgataaatttgtcatttatgatatatacacttttgacgctttcaagaataaacgattggtattcgtacaggtacctccgtcgttaggagatgatagtcatttgactaatccgttattgtctccgtattatcgtaattcagtagccagacaaatggtcaataatatgatttttaatcaagattcatttttaaaatatttattagaacatctgattagaagccactatagagtttctaaacatataacaatagttagatacaaggataccgaagaattaaatctaacgagaatatgttataatagagataagtttaaggcgtttgtattcgcttggtttaacggcgtttcggaaaatgaaaaggtactagatacgtataaaaaggtatctaatttgatataatgaattcagtgactgtatcacacgcgccatatactattacttatcacgatgattgggaaccagtaatgagtcaattggtagagttttataacgaagtagccagttggctgctacgagacgagacgtcgcctattcctgataagttctttatacagttgaaacaaccgcttagaaataaacgagtatgtgtgtgcggtatagatccgtatccgaaagatggaactggtgtaccgttcgaatcaccaaattttacaaaaaaatcaattaaggagatagcttcatctatatctagattaaccggagtaattgattataaaggttataaccttaatataatagacggggttataccctggaattattacttaagttgtaaattaggagaaacaaaaagtcacgcgatctactgggataagatttccaagttactgctgcagcatataactaaacacgttagtgttctttattgtttgggtaaaacagatttctcgaatatacgggcaaagttagaatccccggtaactaccatagtcggatatcatccagcggctagagaccgccaattcgagaaagatagatcatttgaaattatcaacgttttactggaattagacaacaaggcacctataaattgggctcaagggtttatttattaatgctttagtgaaattttaacttgtgttctaaatggatgcggctattagaggtaatgatgttatctttgttcttaagactataggtgtcccgtcagcgtgcagacaaaatgaagatccaagatttgtagaagcatttaaatgcgacgagttagaaagatatattgagaataatccagaatgtacactattcgaaagtcttagggatgaggaagcatactctatagtcagaattttcatggatgtagatttagacgcgtgtctagacgaaatagattatttaacggctattcaagattttattatcgaggtgtcaaactgtgtagctagattcgcgtttacagaatgcggtgccattcatgaaaatgtaataaaatccatgagatctaatttttcattgactaagtctacaaatagagataaaacaagttttcatattatctttttagacacgtataccactatggatacattgatagctatgaaacgaacactattagaattaagtagatcatctgaaaatccactaaccagatcgatagacactgccgtatataggagaaaaacaactcttcgggttgtaggtactaggaaaaatccaaattgcgacactattcatgtaatgcaaccaccgcatgataatatagaagattacctattcacttacgtggatatgaacaacaatagttattacttttctctacaacaacgattggaggatttagttcctgataagttatgggaaccagggtttatttcattcgaagacgctataaaaagagtttcaaaaatattcattaattctataataaactttaatgatctcgatgaaaataattttacaacggtaccactggtcatagattacgtaacaccttgtgcattatgtaaaaaacgatcgcataaacatccgcatcaactatcgttggaaaatggtgctattagaatttacaaaactggtaatccacatagttgtaaagttaaaattgttccgttggatggtaataaactgtttaatattgcacaaagaattttagacactaactctgttttattaaccgaacgaggagaccatatagtttggattaataattcatggaaatttaacagcgaagaacccttgataacaaaactaattttgtcaataagacatcaactacctaaggaatattcaagcgaattactctgtccgaggaaacgaaagactgtagaagctaacatacgagacatgttagtagattcagtggagaccgatacctatccggataaacttccgtttaaaaatggtgtattggacctggtagacggaatgttttactctggagatgatgctaaaaaatatacgtgtactgtatcaaccggatttaaatttgacgatacaaagttcgtcgaagacagtccagaaatggaagagttaatgaatatcattaacgatatccaaccattaacggatgaaaataagaaaaatagagagctatatgaaaaaacattatctagttgtttatgcggtgctaccaaaggatgtttaacattcttttttggagaaactgcaactggaaagtcgacaaccaaacgtttgttaaagtctgctatcggtgacctgtttgttgagacgggtcaaacaattttaacagatgtattggataaaggacctaatccatttatcgctaacatgcatttgaaaagatctgtattctgtagcgaactacctgattttgcatgtagtgggtcaaagaaaatcagatctgataatattaaaaagttgacagaaccttgtgtcattggaagaccgtgtttctccaataaaattaataatagaaaccatgcgacaatcattatcgatactaattacaaacctgtttttgataggatagataacgcattaatgagaagaattgccgtcgtgcgattcagaacacacttttctcaaccttctggtagagaggctgctgaaaataatgacgcgtacgataaagtcaaactattagacgaggggttagatggtaaaatacaaaataatagatatagattcgcatttctatacttgttggtgaaatggtacagaaaatatcatgttcctattatgaaactatatcctacacccgaagagattcctgactttgcattctatctcaaaataggtactctgttagtatctagctctgtaaagcatattccattaatgacggacctctccaaaaagggatatatattgtacgataatgtggttactcttccgttgactactttccaacagaaaatatccaagtattttaattctagactatttggacacgatatagagagcttcatcaatagacataagaaatttgccaatgttagtgatgaatatctgcaatatatattcatagaggatatttcatctccgtaaatatatgctcatatatttatagaagatatcacatatctaaatgaataccggaatcatagatttatttgataatcatgttgatagtataccaactatattacctcatcagttagctactctagattatctagttagaactatcatagatgagaacagaagcgtgttattgttccatattatgggatcaggtaaaacaataatcgctttgttgttcgccttggtagcttccagatttaaaaaggtttacattctagtgccgaacatcaacatcttaaaaattttcaattataatatgggtgtagctatgaacttgtttaatgacgaattcatagctgagaatatctttattcattccacaacaagtttttattctcttaattataacgataacgtcattaattataacggattatctcgctacaataactctatttttatcgttgatgaggcacataatatctttgggaataatactggagaacttatgaccgtgataaaaaataaaaacaagattccttttttactattgtctggatctcccattactaacacacctaatactctgggtcatattatagatttaatgtccgaagagacgatagattttggtgaaattattagtcgtggtaagaaagtaattcagacacttcttaacgaacgcggtgtgaatgtacttaaggatttgcttaaaggaagaatatcatattacgaaatgcctgataaagatctaccaacgataagatatcacggacgtaagtttctagatactagagtagtatattgtcacatgtctaaacttcaagagagagattatatgattactagacgacagctatgttatcatgaaatgtttgataaaaatatgtataacgtgtcaatggcagtattgggacaacttaatctgatgaataatttagatactttatttcaggaacaggataaggaattgtacccaaatctgaaaataaataatggcgtgttatacggagaagaattggtaacgttaaacattagttccaaatttaaatactttattaatcggatacagacactcaacggaaaacattttatatacttttctaattctacatatggcggattggtaattaaatatatcatgctcagtaatggatattctgaatataatggttctcagggaactaatccacatatgataaacggcaaaccaaaaacatttgctatcgttactagtaaaatgaaatcgtctttagaggatctattagatgtgtataattctcctgaaaacgatgatggtagtcaattgatgtttttgttttcatcaaacattatgtccgaatcctatactctaaaagaggtaaggcatatttggtttatgactatcccagatactttttctcaatacaaccaaattcttggacgatctattagaaaattctcttacgccgatatttctgaaccagttaatgtatatcttttagccgccgtatattccgatttcaatgacgaagtgacgtcattaaacgattacacacaggatgaattaattaatgttttaccatttgacatcaaaaagctgttgtatctaaaatttaagacgaaagaaacgaatagaatatactctattcttcaagagatgtctgaaacgtattctcttccaccacatccatcaattgtaaaagttttattgggagaattggtcagacaatttttttataataattctcgtattaagtataacgataccaagttacttaaaatggttacatcagttataaaaaataaagaagacgctaggaattacatagatgatattgtaaacggtcacttctttgtatcgaataaagtatttgataaatctcttttatacaaatacgaaaacgatattattacagtaccgtttagactttcctacgaaccatttgtttggggagttaactttcgtaaagaatataacgtggtatcttctccataaaactgatgagatatataaagaaataaatgtcgagctttgttaccaatggatacctttccgttacattggaaccacacgagctgacgttagacataaaaactaatattaggaatgccgtatataagacgtatctccatagagaaattagtggtaaaatggccaagaaaatagaaattcgtgaagacgtggaattacctctcggcgaaatagttaataattctgtagttataaacgttccgtgtgtaataacctacgcgtattatcacgttggggatatagtcagaggaacattaaacatcgaagatgaatcaaatgtaactattcaatgtggagatttaatctgtaaactaagtagagattcgggtactgtatcatttagcgattcaaagtactgcttttttcgaaatggtaatgcgtatgacaatggcagcgaagtcactgccgttctaatggaggctcaacaaggtatcgaatctagttttgtttttctcgcgaatatcgtcgactcataaaaaagagaatagcggtaagtataaacacgaatactatggcaataattgcgaatgttttattctcttcgatatatttttgataatatgaaaaacatgtctctctcaaatcggacaaccatctcataaaatagttctcgcgcgctggagaggtagttgccgctcgtataatctctccagaataatatacttgcgtgtcgtcgttcaatttatacggatttctatagttctctgttatataatgcggtttgccctcatgattagacgacgacaatagtgttctaaatttagatagttgatcagaatgaatgtttattggcgttggaaaaattatccatacagcgtctgcagagtggttgatagttgttcctagatatgtaaaataatccaacttactaggcagcaaattgtctagataaaatactgaatcaaacggtgcagacgtattggcggatctaatggaatccaattgattaactatcttttgaaaatatacatttttatgatccaatacttgtaagaatatagaaataatgataagtccatcatcgtgtttttttgcctcttcataagaactatattttttcttattccaatgaacaagattaatctctccagagtatttgtacacatctatcaagtgattggatccataatcgtcttcctttccccaatatatatgtagtgatgataacacatattcattggggagaaaccctccacttatatatcctcctttaaaattaatccttactagttttccagtgttctggatagtggttggtttcgactcattataatgtatgtctaacggcttcaatcgcgcgttagaaattgcttttttagtttctatattaataggagatagttgttgcggcatagtaaaaatgaaatgataactgtttaaaaatagctcttagtatgggaattacaatggatgaggaagtgatatttgaaactcctagagaattaatatctattaaacgaataaaagatattccaagatcaaaagacacgcatgtgtttgctgcgtgtataacaagtgacggatatccgttaataggagctagaagaacttcattcgcgttccaggcgatattatctcaacaaaattcagattctatctttagagtatccactaaactattacggtttatgtactacaatgaactaagagaaatctttagacggttgagaaaaggttctatcaacaatatcgatcctcactttgaagagttaatattattgggtggtaaactagataaaaaggaatctattaaagattgtttaagaagagaattaaaagaggaaagtgatgaacgtataacagtaaaagaatttggaaatgtaattctaaaacttacaacacgggataaattatttaataaagtatatataagttattgcatggcgtgttttattaatcaatcgttggaggatttatcgcatactagtatttacaatgtagaaattagaaagattaaatcattaaatgattgtattaacgacgataaatacgaatatctgtcttatatttataatatgctagttaatagtaaatgaacttttacagatctagtataattagtcagattattaagtataatagacgactagctaagtctattatttgcgaggatgactctcaaattattacactcacggcattcgttaaccaatgcctatggtgtcataaacgagtatccgtgtccgctattttattaactactgataacaaaatattagtatgtaacagacgagatagttttctctattctgaaataattagaactagaaacatgtttagaaagaaacgattatttctgaattattccaattatttgaacaaacaggaaagaagtatactatcgtcatttttttctctagatccagctactactgataatgatagaatagatgctatttatccgggtggcatacccaaaaggggtgagaatgttccagagtgtttatccagggaaattaaagaagaagttaatatagacaattcttttgtattcatagacactcggttttttattcatggcatcatagaagataccattattaataaattttttgaggtaatcttctttgtcggaagaatatctctaacgagtgatcaaatcattgatacatttaaaagtaatcatgaaatcaaggatctaatatttttagatccgaattcaggtaatggactccaatacgaaattgcaaaatatgctctagatactgcaaaacttaaatgttacggccatagaggatgttattatgaatcattaaaaaaattaactgaggatgattgattagaaaatataaattaatttaccatcgtgtatttttataacgggattgtccggcatatcatgtagatagttaccgtctacatcgtatactcgaccatctacgcctttaaatcctctatttattgacattaatctattagaattggaataccaaatattagtaccctcaattagtttattggtaatattttttttagacgatagatcgatggctcttgaaaccaaggttttccaaccggactcattgtcgatcggtgagaagtctttttcattagcatgaatccattctaatgatgtatgtttaaacactctaaacaattggacaaattcttttgatttgctttgaatgatttcaaataggtcttcgtctacagtaggcataccattagataatctagccattataaagtgcacgtttacatatctacgttctggaggagtaagaacgtgactattgagacgaatggctcttcctactatctgacgaagagacgcctcgttccatgtcatatctaaaatgaagatatcattaattgagaaaaaactaataccctcgcctccactagaagagaatacgcatgttttaatgcattctccgttagtgtttgattcttggttaaactcagccaccgccttgattctagtatcttttgttctagatgagaactctatattagagataccaaagactttgaaatatagtaataagatttctattcctgactgattaacaaatggttcaaagactagacatttaccatgggatgctaatattcccaaacatacatctataaatttgacgcttttctcttttaattcagtaaatagagagatatcagccgcactagcatcccctttcaatagttctccctttttaaaggtatctaatgcggatttagaaaactctctatctcttaatgaatttttaaaatcattatatagtgttgctatctcttgcgcgtattcgcccggatcacgattttgtctttcaggaaagctatcgaacgtaaacgtagtagccatacgtctcagaattctaaatgatgatatacctgtttttatttcagcgagtttagccttttgataaatttcttcttgctttttcgacatattaacgtatcgcattaatactgttttcttagcgaatgatgcagacccttctacgtcatcaaaaatagaaaactcgttattaactatatacgaacatagtcctcctagtttggagactaattctttttcatcgactagacgtttattctcaaatagtgattggtgttgtaaggatcctggtcgtagtaagttaaccaacatggtgaattcttgcacactattgacgataggtgtagccgataaacaaatcatcttatggttttttaacgcaatggtcttagataaaaaattatatactgaacgagtaggacggatcttaccatcttctttgattaatgatttagaaatgaagttatgacattcatcaatgatgacgcatattctactcttggaattaatagttttgatattagtaaaaaatttatttctaaaattttgatcatcgtaattaataaaaatacaatccttcgttatctctggagcgtatctgagtatagtgttcatccaaggatcttctatcaaagcctttttcaccaataagataatagcccaattcgtataaatatccttaagatgtttgagaatatatacagtagtcattgttttaccgacacccgtttcatggaacaataaaagagaatgcatactgtctaatcctaagaaaactcttgctacaaaatgttgataatccttgaggcgtactacgtccgaccccatcatttcaacgggcatattagtagttctgcgtaaggcataatcgatataggccgcgtgtgatttactcatttatgagtgataagtaataactatgttttaaaaatcacagcagtagtttaactagtcttctctgatgtttgttttcgatactttttgaatcagaagtcatactagaataaagcaacgagtgaacgtaatagagagcttcgtatactctattcgaaaactctaagaacttattaatgaattccgtatccactggattgtttaaaatactaaattgaacactgttcacatccttccaagaagaagacttagtgacggacttaacatgagacataaataaatccaaattttttttacaaacatcactagccaccataatggcgctatctttcaaccagctatcgcttacgcattttagcagtctaacatttttaaagagactacaatatattctcatagtatcgattacacctctaccgaataaagttggaagtttaataatacaatatttttcgtttacaaaatcaaataatggtcgaaacacgtcgaaggttaacatcttataatcgctaatgtatagattgttttcagtgagatgattattagatttaatagcatctcgttcacgtttgaacagtttattgcgtgcgctgaggtcggcaactacggcgtccgctttagtactcctcccataatactttacgctattaatctttaaaatttcatagactttatctagatcgctttctggtaacatgatatcatgtgtaaaaagttttaacatgtcggtcggcattctatttagatcattaactctagaaatctgaagaaagtaattagctccgtattccagactaggtaatgggcttttacctagagacagattaagttctggcaatgtttcataaaatggaagaaggacatgcgttccctcccggatattttttacaatttcatccatttacaactctatagtttgttttcattattattagttattatctcccataatcttggtaatacttaccccttgatcgtaagataccttatacaggtcattacatacaactaccaattgtttttgtacataatagattggatggttgacatccatggtggaataaactactcgaacagatagtttatctttccccctagatacattagccgtaatagttgtcggcctaaagaatatctttggtgtaaagttaaaagttagggttcttgttccattattgctttttgtcagtagttcattataaattctcgagatgggtccgttctctgaatatagaacatcatttccaaatctaacttctagtctagaaataatatcggtcttattcttaaaatctattcccttgatgaagggatcgttaatgaacaaatccttggcctttgattcggctgatctattatctccgttatagacgttacgttgactagtccaaagacttacaggaatagatgtatcgatgatgttgatactatgtgatatgtgagcaaagattgttctcttagtggcatcactatatgttccagtaatggcggaaaactttttagaaatgttatatataaaagaattttttcgtgttccaaacattagcagattagtatgaagataaacactcatattatcaggaacattatcaatttttacatacacatcagcatcttgaatagaaacgataccatcttctggaacctctacgatctcggcagactccggataaccagtcggtgggccatcgctaacaataactagatcatccaacaatctactcacatatgcatctatataatctttttcatcttgtgagtaccctggatacgaaataaatttattatccgtatttccataataaggtttagtataaacagagagagatgttgccgcatgaacttcagttacagtcgccgttggttggtttatttgacctattactctcctaggtttctctataaacgatggtttaatttgtacattcttaaccatatatccaataaagctcaattcaggaacataaacaaattctttgttgaacgtttcaaagtcgaacgaagagtcacgaataacgatatcggatactggattgaaggttaccgttacggtaatttttgaatcggatagtttaagactgctgaatgtatcttccacatcaaacggagttttaatataaacgtatactgtagatggttctttaatagtgtcattaggagttaggccaatagaaatatcattaagttcactagaatatccagagtgtttcaaagcaattgtattattgatacaattattatataattcttcgccctcaatttcccaaataacaccgttacacgaagagatagatacgtgattaatacatttatatccaacatatggtacgtaactgaatcttcccatacctttaacttctggaagttccaaactcagaaccaaatgattaagcgcagtaatatactgatccctaatttcgaagctagcgatagcctgattgtctggaccatcgtttgtcataactccggatagagaaatatattgcggcatatataaagttggaatttgactatcgactgcgaagacattagaccgtttaatagagtcatccccaccgatcaaagaattaatgatagtattattcattttctatttaaaatggaaaaagcttacaataaactccgtagagaaatatctataatttgtgagttttccttaaagtaacagcttccgtaaacgccgtctttatctcttagtaggtttattgtatttatgaccttttccttatcttcatagaatactaaaggcaacaaagaaatttttggttcttctctaagagctacgtgagacttaaccatagaagccaacgaatccctacatattttagaacagaaataccctacttcaccacccttgtatgtctcaatactaataggtctaaaaaccaaatcttgattacaaaaccaacacttatcaattacactatttgtcttaatagacacatctgccatagatttataatactttggtagtatacaagcgagtgcttcttctttagcgggcttaaagactgctttaggtgctgaaataaccacatctggaaggcttactcgcttagccatttaattacggaactatttttttatacttctaatgagcaagtagaaaacctctcatctacaaaaacgtactcgtgtccataatcctctaccatagttacacgttttttagatctcatatgtgctaaaaagttttcccatactaattggttactattatttttcgtataatttttaacagtttgaggttttagatttttagttacagaagtgatatcgaatattttatccaaaaagaatgaataattaattgtcttagaaggagtgttttcttggcaaaagaataccaagtgcttaaatatttctactacttcattaatcttttctgtactcagattcagtttctcatcttttacttgattgattatttcaaagactaacttataatcctttttatttattctctcgttagccttaagaaaactagatacaaaatttgcatctacatcatccgtggatatttgatttttttccatgatatccaagagttccgagataatttctccagaacattgatgagacaataatctccgcaatacatttctcaaatgaataagtttattagacacgtggaagtttgactttttttgtacctttgtacatttttgaaataccgactcgcaaaaaatacaatattcatatccttgttcagatactataccgttatgtctacaaccgctacataatcgtagattcatgttaacactctacgtatctcgtcgtccaatattttatataaaaacattttatttctagacgttgccagaaaatcctgtaatatttttagttttttgggctgtgaataaagtatcgccctaatattgttaccgtcttccgccaatatagtagttaaattatccgcacatgcagaagaacaccgcttaggcggattcagtacaatgttatatttttcgtaccaactcatttaaatatcataatctaaaatagttctgtaatatgtctagcgctaatatattgatcataatcctgtgcataaattaagatacaacaatgtctcgaaatcatcgacatggcttcttccatagttagaagatcgtcgtcaaagttagcaacgtgattcatcaacatttgctgttttgaggcagcaaatactgaaccgtcgccattcaaccattcataaaaaccatcgtctgaatccattgataatttcttgtactggtttttgagagctcgcatcaatctagcatttctagctcccggattgaaaacagaaagaggatcgtacatccagggtccattttctgtaaatagaatcgtataatgtcccttcaagaagatatcagacgatccacaatcaaagaattggtctccgagtttgtaacaaactgcggactttaacctatacatgataccgtttagcataatttctggtgatacgtcaatcggagtatcatctattagagatctaaagccggtgtaacattctccaccaaacatattcttattctgacgtcgttctacataaaacatcattgctccattaacgataacaggggaatgaacagcactacccatcacattagttcccaatggatcaatgtgtgtaactccagaacatcttccatagcctatgttaggaggagcgaacaccactcttccactattgccatcgaatgccatagaataaatatccttggaattgatagaaatcggactgtcggatgttgtgatcatcttcataggattaacaactatgtatggtgccgcctgaagtttcatatcgtaactgatgccgtttataggtctagccacagaaaccaacgtaggtctaaatccaactatagacaaaatagaagccaatatctgttcctcatctgtcataacttgagagcatccagtatgaataatcttcattagatggggatctaccgcatcatcatcgttacaataaaaaattcccattctaatgttcataattgcttttctaatcatggtatgcatgtttgctctctgaatctctgtggaaattagatctgatacacctgtaatcactatcggattatcctccgtaagacgattaaccaacaacatataattataagactttacttttctaaattcataaagttgctggattaggctataggtgtctccatgtacatacgcgttctcgagcgcaggaagtttaataccgaatagtgccatcagaataggatgaatatagtaattagtttctggttttctataaataaaagacaaatcttgtgaactagacatatcggtaaaatgcatggattggaatcgtgtagtcgacagaagaatatgatgattagatggagagtatattttatctaactctttgagttggtcaccgattctaggactagctcgagaatgaataagtactaaaggatgagtacatttcacagaaacactagcattgttcaatgtgctctttacatgggtaaggagttgaaatagctcgtttctatttgttctgacaatatttagtttattcataatgttaagcatatcctgaatagtaaagttagatgtgtcatacttgttagtagttagatatttagcaattgcattcccatcatttctcaatctcgtactccaatcatgcgtggatgctacttcgtcgatggaaaccatacaatcctttttgataggctgttgagattgattatttcctgcacgtttaggtttggtacgttgatttctagcccctgcggatataaagtcatcgtctacaatttgggacaatgaattgcatacactacaagacaaagatttatcagaagtgtgaatatgatcttcatctaccaaagaaagagtttgattagtataactagattttagtcctgcgttagatgttaaaaaaacatcgctattgaccacggcttccattatttatattcgtagtttttactcgaaagcgtgattttaatatccaatcttattacttttggaatcgttcaaaacctttgactaattgtagaatttgatctattgccctacgcgtatactcccttgcatcatatacgttcgtcaccagatcgtttgtttcggcctgaagttggtgcatatctctttcaacattcgacatgagatccttaagggccatatcgtctagattttgttgagatgctgctcctggatttggattttgttgtgctgttgtacatactgtaccaccagtaggtgtaggagtacatacagtggccacaataggaggttgaggaggtgtaaccgttggagtagtacaagaaatatttccatccgattgttgtgtacatgtagttgttggtaacgtctgagaaggttgggtagatggcggtgtcgtcgtcttttgatctttattaaatttagagataatatcctgaacagcattgctcggcgtcaacgctggaaggagtgaactcgccggcgcatcagtatctgcagacagccaatcaaaaagattagacatatcagatgatgtattagtttgttgtcgtggttttggtgtaggagcagtactactaggtagaagaataggagccggtgtagctgttggaaccggctgtggagttatatgaatagttggttgtagcggttggataggctgtctgctggcggccatcatattatctctagctagttgttctcgcaactgtctttgataatacgactcttgagactttagtcctatttcaatcgcttcatcctttttcgtatccggatccttttcttcagaataatagattgacgactttggtgtagaggattctgccagcctctgtgagaacttgttaaagaagtccatttaaggctttaaaattgaattgcgattataagattaaatggcagacacagacgatattatcgactatgaatccgatgatctcaccgaatacgaggatgatgaagaagaggaagaagatggagagtcactagaaactagtgatatagatcccaaatcttcttataagattgtagaatcagcatccactcatatagaagatgcgcattccaatcttaaacatatagggaatcatatatctgctcttaaacgacgctatactagacgtataagtctatttgaaatagcgggtataatagcagaaagctataacttgcttcaacgaggaagattacctctagtttcagaattttctgacgaaacgatgaagcaaaatatgctacatgtaattatacaagagatagaggagggttcttgtcctatagtcatcgaaaagaacggagaattgttgtcggtaaacgattttgacaaagatggtctaaaattccatctagactatattatcaaaatttggaaacttcaaaaacgatattagaatttatacgaatatcgttctctaaatgtcacaatcaagtctcgcatgttcagcaatttattgtcgtactttatatcgtgttcattaacgatattttgcaaaatagtaatgattctatcttccttcgatagatattcttcagagattattgtcttatattctttcttgttatccgatatgaatttgataagactttgaacattattgatacccgtctgtttaattttttctacagatattttagttttggcagattctatcgtatctgtcaatagacatccaacatcgacattcgacgtcaattgtctataaatcaacgtataaattttagaaataacattagcgaattgttgtgcattgatgtcgttattctgaaacagtatgattttaggtagcattttcttaacaaagagaacgtatttattgttactcagttgaacagatgatatatccagattactaacgcatctgattccgtataccaaactttcagaagaaatggtatacaattgtttgtattcattcaatgtctctttttcagaaattagtttagagtcgaatactgcaataattttcaagagatagttttcatcagataagattttatttagtgtagatatgataaaactattgttttgttggagaacttgatacgccgcgttctctgtagtcgacgctctcaaatgggaaacaatctccattatttttttggaatcggatactatatcttcggtatcttgacgcagtctagtatacatagagttaagagagattagagtttgtacattaagcaacatgtctctaaatgtggctacaaacttttcctttttcacatcatctagtttattatataccgatttcacaacggcaccagatttaaggaaccagaatgaaaaactctgataactacaatatttcatcatagttacgattttatcatcttctatagttggtgtaatagcgcatacctttttctccaagactggaaccaacgtcataaaaatgtttaaatcaaaatccatatcaacatctgatgcgctaagaccagtctcgcgttcaagattatctttactaatggtgacgaactcatcgtataaaactctaagtttgtccattatttatttacagatttagttgtttaatttatttgtgctcttccagagttgggatagtatttttctaacgtcggtattatattattaggatctacgttcatatgtatcataatattaatcatccacgttttgataaatctatctttagcttctgaaataacgtatttaaacaaaggagaaaaatatttagctacggcatcagacgcaataacattttttgtaaatgtaacgtatttagacgacagatcttcgttaaaaagttttccatctatgtagaatccatcggttgttaacaccattcccgcgtcagattgaataggagtttgaatagtttgttttggaaatagatccttcaataacttatagttgggtgggaaaaaatcgattttatcactagactctttcttttttactatcattacctcatgaactatttcttgaatgagtatatgtattttctttcctatatcggacgcgttcattggaaaatataccatgtcgttaactataagaatatttttatcctcgtttacaaactgaataatatcagatgtagttcgtaaacgaactatatcatcaccagcacaacatctaactatatgatatccactagtttcctttagccgtttattatcttgttccatattagcagtcattccatcatttaagaaggcgtcaaagataatagggagaaatgacattttggattctgttacgactttaccaaaattaaggatatacggacttactatctttttctcaacgtcaatttgatgaacacacgatgaaaatgtgcttctatgagattgatcatgtagaaaacaacaagggatacaatatttccgcatatcatgaaatatattaagaaatcccaccttattatatttccccaaaggatccatgcacgtaaacattatgccgttatcattaataaagacttctttctcatcggatctgtaaaagttgttactgatttttttcattccaggatctagataattaataatgatgggttttctattcttattctttgtattttggcatatcctagaccagtaaacagtttccactttggtaaaatcagcagacttttgaacgctattaaacatggcattaatggcaataactaaaaatgtaaaatatttttctatgttaggaatatggtttttcactttaatagatatatggtttttggccaaaatgatagatatttttttatccgaggatagtaaaatattattagtcgccgtctctataaaaatgaagctagtctcgatatccaattttattctagaattgataggagtcgccaaatgtaccttatacgttatatctcccttgatgcgttccatttgtgtatctatatcggacacaagatctgtaaatagttttacgttattaatcatcacggtatcgccgtcgctagataacgctaatgtaccatccaagtcccaaatggagagatttaactgttcatcgtttagaataaaatgattaccggtcatattaataaagtgttcatcgtatctagataacaacgacttataattaatgtccaagtcttgaactcgctgaatgatcttttttaacccagttagttttagattggtacgaaatatattgttaaactttgattctacagtaatgtccaaatctagttgtggaaatacttccatcaacattgtttcaaacttgataatattattatctacatcttcgtacgatccaaattccggaatagatgtatcgcacgctctggccacccagataaccaaaaagtcacacgctccaggatatacattgtataaaaagctatcgttttttagtagggtttttttctgcgtgtatacgaagggattaaaaatagtattatcaacgtaactatattccaaattattcttatgagaatagataataatatcgtccttaatatctaacaaatttcctaaatatccctttaattgagtcattcgaagcgtcaatagaatatgtctcttaactatttccggctgttgtatatttaaatgacttcgtaaaaaataatatatgggcgacttctcatctatgtaatcatatggagtgagatatagggctcgttctacctcctgccccttacccacctgtaataccaattgcggacttactatatatcgcatatttatatcgtggggtaaagtgaaaatctactaccgatgatgtaagtcttacaatgttcgaaccagtaccagatcttaatttggaggcctccgtagaactaggggaggtaaatatagatcaaacaacacctatgataaaggagaatagcggttttatatcccgcagtagacgtctattcgcccatagatctaaggatgatgagagaaaactagcactacgattctttttacaaagactttattttttagatcatagagagattcattatttgttcagatgcgttgacgctgtaaaagacgtcactattaccaaaaaaaataacattatcgtggcgccttatatagcacttttaactatcgcatcaaaaggatgcaaacttacagaaacaatgattgaagcattctttccagaactatataatgaacatagtaagaaatttaaattcaactctcaagtatccatcatccaagaaaaactcggataccagtttggaaactatcacgtttatgattttgaaccgtattactctacagtagctctggctattcgagatgaacattcatctggcatttttaatatccgtcaagagagttatctggtaagttcattatctgaaataacatatagattttatctaattaatctaaaatctgatcttgttcaatggagtgctagtacgggcgctgtaattaatcaaatggtaaatactgtattgattacagtgtatgaaaagttacaactggtcatagaaaatgattcacaatttacatgttcattggctgtggaatcaaaacttccaataaaattacttaaagatagaaatgaattatttacaaaattcattaacgagttaaaaaagaccagttcattcaagataagcaaacgcgataaggatacgctactaaaatattttacttaggactggagttagaatttatagacgactcatttcgtttatcattgttactattattactattactatcattattagtgttggcattattagtattcttcttgtcatcttgttcagaaatatacagcaatgctatacctaatactaaatacattatcatgctcgcaatggctctaacaacaacgaaccaaaatgaatttggtcgtagcttttgttcacaaaaatacataaagaaatgtctacataaatctatggcgccattggctacttgaaatagcgccagtcctcctacagattttaatatagctgtataacatgacatttattcatcatcaaaagagacagagtcaccatctgtcatatttagattttttttcatgtgttcaaagtatcctctactcatttcattataatagtttatcatacttagaattttaggacggatcaatgagtaagacttgactagatcgtcagtagtaatttgtgcatcgtctattctgcatccgcttcgtcgaataatgtatagcatcgctttgagattctccatagctatcaagtctttatacaatgacatggaaatatctgtgaatactttatacttctccaacatcgatgccttaacatcatcgcctactttagcattgaaaatacgttctattgtgtagatggatgtagcaagatttttaaacaacaatgccatcttacacgatgattgcctcaagtctccaatcgtttgtttagaacgattagctacagagtccaatgcttggctgactagcatattattatctttagaaattgtattcttcaatgaggcgtttatcatatctgtgatttcgttagtcatattacagtctgactgggttgtaatgttatccaacatatcacctatggatacggtacacgtaccagcatttgtaataatcctatctaagatgttgtatggcattgcgcagaaaatatcttctcctgtaatatctccactctcgataaatctactcagattattcttaaatgccttattctctggagaaaagatatcagtgtccatcatttcattaatagtatacgcagaaaagataccacgagtatcaattctatccaagatacttatcggttccgagtcacagataatggtttcctctccttcgggagatcctgcatagaaatatctaggacaatagtttctatactgtctgtaactctgataatctctaaagtcactaactgataccatgaaattgagaagatcaaacgctgaagtaattaatttttctgcctcgtttttactacaactagttttcatcaatgtagtgacgatgtattgtttagttacttttggtctaatactgatgatagagatattattgcttcccataatggatcttctagtagtcaccttaaagcccattgatgcgaatagcagatagataaagtcttggtatgactcctttctaatatagtacggactacctttgtcacccaactttatacccacataagccataacaacctctttaatagccgtttcatgaggtttatcagccatgagcctgagtagttggaagaatctcatgaatcccgtctcagaaagtcctatatgcatgatagatttatctttcctgggaaactctcgtatagtcatagatgaaatactctttaaagtttctgaaataagattagtaacagtcttacctccgactactctaggtaacaaacaaactctaataggtgttttctctgcggagataatatcagaaaggatagagcaataagtagtattattgtgattataaagaccgaatacataacaggtagaatttataaacatcatgtcctgaaggtttttagacttgtattcctcgtaatccataccgtcccaaaacatggatttggtaactttgatagccgtagatctttgttccttcgccaacaggttaaagaaattaataaagaatttgttgtttctatttatgtccacaaattgcacgtttggaagcgccacggttacattcactgcagcattttgaggatcgcgagtatgaagtacgatgttattgtttactggtatatctggaaagaaatctaccagtctaggaataagagattgatatcgcatagaaatagtaaagtttataatctcatcatcgaagagcattttgttaccattgtaataaatatccactctgtcatatgtataaatgaagtactgttcaaacatgatgagatgtttatatgttggcatagtagtgagatcgacgtttggtaatggcaatgtattaagattaactccataatgtctagcagcatctgcgatgttataagcgtcgtcaaagcggggtcgatcttgtattgttatatattgtctaacacctataagattatcaaaatcttgtctgcttaatacaccgttaacaatttttgccttgaattcttttattggtgcattaataacatccttatagaggatgttaaacaaataagtgttatcaaagttaagatctggatatttcttttctgctagaacatccattgagtcggagccatctggtttaatataaccaccgataaatctagctctgtattctgtatccgtcaatctaatattaagaaggtgttgagtgaaaggtggaagatcgtaaaagctgtgagtattaatgataggattagtttccgaactaatgttaattggggtattaataatatctatatttccagcgttaagtgtaacattaaacagttttaattcacgtgacgtggtatcaattaaataattaatgcccaatttggatatagcagcctgaagctcatcttgtttagttacggatcctaatgagttattaagcaatatatcgaacggatgaacgaaggttgttttaagttggtcacatactttgtaatctagacatagatgcggaagaacggtagaaactatacgaaataaatattcagagtcctctaattgatcaagagtaactattgacttaataggcatcatttatttagtattaaatgacgaccgtaccagtgacggatatacaaaacgatttaattacagagttttcagaagataattatccatctaacaaaaattatgaaataactcttcgtcaaatgtctattctaactcacgttaacaacgtggtagatagagaacataatgccgccgtagtgtcatctccagaggaaatatcctcacaacttaatgaagatctatttccagatgatgattcaccggccactattatcgaacgagtacaacctcatactactattattgacgatactccacctcctacgtttcgtagagagttattaatatcggaacaacgtcaacaacgagaaaaaagatttaatattacagtatcgaaaaatgctgaagcaataatggaatctagatctatgataacttctataccaacacaaacaccatccttgggagtagtttatgataaagataaaagaattcagatgttagaggatgaagtggttaatcttagaaatcaacgatctaatacaaaatcatctgataatttagataattttaccaaaatactatttggtaagactccgtacaaatcaacagaagttaataagcgtatagccatcgttaattatgcaaatttgaacgggtcccccttatcagtcgaggacttggatgtttgttcggaggatgaaatagatagaatctataaaacgattaaacaatatcacgaaagtagaaaacgaaaaattatcgtcactaacgtgattattattgtcataaacattatcgagcaggcattgctaaaactcggatttgaagaaatcaaaggactgagtaccgatatcacttcagaaattatcgatgtggagatcggagatgactgcgatgctgtagcatctaaactaggaatcggtaacagtccggttcttaatattgtattgtttatactcaagatattcgttaaacgaattaaaattatttaatttaatacattcccatatccagacaacaatcgtctggattaatctgttcctgtcgtctcataccggacgacatattaatctttttattagtgggcatctttttagatggtttctttttcccagcattaactgagtcgatacctagaagatcgtgattgatctctccgaccattccacgaacttctaattggccgtctctgacggtaccataaactattttaccagcattagtaacagcttggacaatctgaccatccatcgcattgtacgatgtagtagtaactgttgttctacgtctaggagcaccagaagtatttttggagcccttggatgttgatgtagaagaagacgaggattttgattttggtttacatgtaatacattttgaactctttgattttgtatcacatgcgccggcagtcacatctgtttgagaattaagattattgttgcctcctttgacggctgcatctccaccgatttgcgctagtagatttttaagctgtggtgtaatcttattaactgtttcgatataatcatcgtaactgcttctaacggctaaattttttttatccgccatttagaagctaaaaatatttttatttatgcagaagatttaactagattatacaatgaactaatatgatccttttccagattatttacaaacttggtattttttggttctggaggaggcgaatttaaattcggacttggattcggattttgtaagttcttgatcttattatacatcgagtataggatggcgacagtaactgctacacaaataccgatcaaaagaagaataccaatcatttattgacaataacttcactattgatcaagtatgcaatatatcatcttttcactaaataagtagtaataatgattcaacaatgtcgagatatatggacgataataatttagttcatggaaatatcgctatgattggtgtgaatgactccgctaactctgtggggtgcgcagtgctttccccacatagaataaattagcattccgactgtgataataataccaagtataaacgccataatactcaatactttccatgtacgagtgggactggtagacttactaaagtcaataaaggcgaagatacacgaaagaatcaaaagaatgattccagcgattagcacgccggaaaaataatttccaatcataagcatcatgtccatttaactaataaaaattttaaatcgccgaatgaacaaagtggaatataaaccatataaaaacaatagtttgtactgcaaaaataatatctatttttgttttcgaagatatggtaaaattaaatagtagtacacagcatgttataactaacagcagcaacggctcgtaattacttatcatttactagacgaaaaggtggtgggatattttcttgctcaaataatacgaatatatcacccatccattttatgcgatgtttatatactctaatctttaatagatctatagacgacgggtttaccaacaatatagattttatcgattcatctaatttaaacccttccttaaacgtgaatgatctattatctggcataacgatgaccctacctgatgaatcggacaatgtactgggccatgtagaataaattatcaacgaattatcgtctacgaacatttatatcatttgttttaattttaggacgcgaataaatggatataaaatagaaaataacagatattacaaccagtgttatggccgcgcccaaccaggtaggcagttttattttatcttttactacaggttctcctggatgtacgtcaccaacggcggacgtagttctagtacaattagacgtaagttccgcttgggaattttttaacgctaaagagttaacgttaatcgtgcacccaacgtatttacatctagttcgttgaacatcttgattataatataaccattttctatctctagattcgtcagtgcactcatgtaaccaacataccctaggtcctaaatatttatctccggaattagattttggataattcgcgcaccaacaatttctatttcctttatgatcgttacaaaagacgtataatgccgtatccccaaaagtaaaataatcaggacgaataattctaataaactcagaacaatatctcgcatccatatgtttggagcaaatatcggaataagtagacatagccggtttccgttttgcacgtaaccattctaaacaattggggtttccaggatcgtttctacaaaatccagtcatgaaatcgtcacaatgttctgtcttgtaattattattaaatatttttggacagtgtttggtatttgtcttagaacaacattttgccacgctatcactatcgcccaggagataatccttttttataaaatgacatcgttgcccggatgctatataatcagtagcgtgttttaaatccttaatatattcaggagttacctcgttctgataatagattaatgatccaggacgaaatttgaaagaactacatggttctccatgaattaatacatattgtttagcaaattcaggaactataaaactactacaatgatctatcgacataccatctatcaaacaaaacttgggtttaatttctcccggagatgtttcataatagtacgtataactttcttctgcaaacttaacagctctattatattcaggataattaaaacctaattccatatatttgtctcgtatatctgctattcctggtgctattttgattctattaagagtaacagctgcccccattcttaataatcgtcagtatttaaactgttaaatgttggtatatcaacatctaccttatttcccgcagtataaggtttgttgcaggtatactgttcaggaatggttacatttatacttcttctatagtcctgtctttcgatgttcatcacatatgcaaagaacagaataaacaaaataatgtaagaaataatattaaatatctgtgaattcgtaaatacattgattgccataataattacagcagctacaatacatacaatagacattcccacagtgttgccattacctccacgatacatttgagttactaagcaataggtaataactaagctagtaagaggcaatagaaaagatgagataaatatcatcaatatagagattagaggagggctatatagagccaagacgaacaaaatcaaaccgagtaacgttctaacatcattatttttgaagattcccaaataatcattcattcctccataatcgttttgcatcatacctccatctttaggcataaacgattgctgctgttcctctgtaaataaatctttatcaagcactccagcacccgcagagaagtcgtcaagcatattgtaatatcttaaataactcatttatatattaaaaaatgtcactattaaagatggagtataatctttatgccgaactaaaaaaaatgacttgtggtcaacccctaagtctttttaacgaagacggggatttcgtagaagttgaaccgggatcatcctttaagtttctgatacctaagggattttacgcctctccttccgtaaagacgagtctagtattcgagacattaacaacgaccgataataaaatcactagtatcaatccaacaaatgcgccaaagttatatcctcttcaacgcaaagtcgtatctgaagtagtttctaatatgaggaaaatgatcgaatcaaaacgtcctctatacattactcttcacttggcgtgtggatttggtaagactattaccacgtgttatcttatggctacacacggtagaaaaaccgtcatttgcgtacccaataaaatgttaatacatcaatggaagacacaggtagaggcagtcggattggaacataagatatccatagatggagtaagtagtctattaaaggaactaaagactcaaagtccggatgtattaatagtagtcagtagacatctgacaaacgatgccttttgtaaatatatcaataagcattatgatttgttcatcttggatgaatcacatacgtataatctgatgaacaatacagcagttacaagatttttagcgtattatcctccgatgatgtgttattttttaactgctacacctagaccatctaaccgaatttattgtaacagtattattaatattgccaagttatccaatctaaaaaaaactatctatgcagtagatagtttttttgagccatattccacagataatattagacatatggtaaaacgactagatggaccatctaataaatatcatatatataccgagaagttattatctgtagacgagcctagaaatcaacttattcttgataccctggtagaagaattcaagtcaggaactattaatcgcattttagttattactaaactacgtgaacatatggtattattctacaaacgattattagattttttcggaccagaggttgtatttataggagacgcccaaaatagacgtactccagatatggtcaaatcaatcaaggaactaaatagatttatattcgtatccaccttattttattccggtactggtttagatattcctagtttggattcgttgttcatttgctcggcagtaatcaacaatatgcaaatagagcaattactagggagggtatgtcgagaaacagaactattagataggacggtatatgtatttcctaacacatccatcaaagaaataaagtacatgataggaaatttcatgcaacgaattattagtctgtctgtagataaactaggatttaaacaaaaaagttatcggaaacatcaagaatccgatcccacttctgcatgtacaacatcatccagagaagaacgtgtattaaatagaatatttaactcgcaaaatcgttaagaagtttaagcgacgatccgcatgctgcgcaggccagtgtattacccctcatagtattaatataatccaatgatacttttgtgatgtcggaaatcttaaccaatttagactgacaggcagaacacgtcatgcaatcatcatcgtcatcgataactgtagtcttgggcttctttttgcgactcttcattccggaacgcacattggtgctatccatttaggtagtaaaaaataagtcagaatatgccctataacacgatcgtgcaaaacctggtatatcgtctctatctttatcacaatatagtgtatcgacatttttattattattgacctcgtttatcttggaacatggaatgggaacatttttgttatcaacggccatctttgccttaattccagatgttgtaaaattataactaaacagtctatcatcgacacaaatgaaattcttgtttagacgtttgtagtttacgtatgcggctcgttcgcgtctcattttttcagatattgcaggtactataatattaaaaataagaatgaaataacataggattaaaaataaagttatcatgacttctagcgctgatttaactaacttaaaagaattacttagtctgtacaaaagtttgagattttcagattctgcggctatagaaaagtataattctttggtagaatggggaacatctacttactggaaaataggcgtgcaaaaggtagctaatgtcgagacgtcaatatctgattattatgatgaggtaaaaaataaaccgtttaatattgatccgggctattacattttcttaccggtatattttgggagcgtctttatttattcgaagggtaaaaatatggtagaacttggatctggaaactcttttcaaataccagatgatatgcgaagtgcgtgtaacaaagtattagacagcgataacggaatagactttctgagatttgttttgttaaacaatagatggataatggaagatgctatatcaaaatatcagtctccagttaatatatttaaactagctagtgagtacggattaaacatacccaaatatttagaaattgaaatagaggaagacacattatttgacgacgagttatactctattatagaacgctctttcgatgataaatttccaaaaatatccatatcgtatattaagttgggagaacttagacggcaagttgtagactttttcaaattctcattcatgtatattgagtccatcaaggtagatcgtataggagataatatttttattcctagcgttataacaaaatcaggaaaaaagatattagtaaaagatgtagaccatttaatacgatccaaggttagagaacatacatttgtaaaagtaaaaaagaaaaacacattttccattttatacgactatgatggaaacggaacagaaactagaggagaagtaataaaacgaattatagacactataggacgagactattatgttaacggaaagtatttctctaaggttggtagtgcaggcttaaagcaattgactaataaattagatattaatgagtgcgcaactgtcgatgagttagttgatgagattaataaatccggaactgtaaaacgaaaaataaaaaaccaatcagcatttgatttaagcagagaatgtttgggatatccagaagcggattttataacgttagttaataacatgcggttcaaaatagaaaattgtaaggttgtaaatttcaatattgaaaatactaattgtttaaataacccgagtattgaaactatatatggaaactttaaccagttcgtctcaatctttaatgtcgtcaccgatgtcaaaaaaagattattcgagtgaaataatatgcgcctttgatataggtgcaaaaaatcctgccagaactgttttagaagtcaaggataactccgttagggtattggatatatcaaaattagactggagttctgattgggaaaggcgcatagctaaagatttgtcacaatatgaatacactacagttcttctagaacgtcagcctagaaggtcgccgtatgttaaatttatctattttattaaaggctttttatatcatacatcggctgccaaagttatttgcgtctcgcctgtcatgtctggtaattcatatagagatcgaaaaaagagatcggtcgaagcatttcttgattggatggacacattcggattgcgagactccgttccggatagacgcaaattagacgatgtagcggatagtttcaatttggctatgagatacgtattagataaatggaatactaattatacaccttataataggtgtaaatctagaaattacataaaaaaaatgtaataacgttagtaacgccattatggataatctatttacctttctacatgaaatagaagatagatatgccagaactatttttaactttcatctaataagttgcgatgaaataggagatatatatggtcttatgaaagaacgcatttccttagaggatatgtttgataatatagtgtataataaagatatacatcctgccattaagaaactagtgtattgcgacatccaacttactaaacacattattaatcagaatacgtatccggtatttaacgattcttcacaagtgaaatgttgtcattatttcgacataaactcagataatagcaatattagctctcgtacagtagagatatttgagagggaaaagtcatctcttgtatcatatattaaaactaccaataagaagagaaaggtcaattacggcgaaataaagaaaactgttcatggaggcactaatgcaaattacttttccggtaaaaagtctgacgagtatctgagtactacagttagatccaacattaatcaaccttggatcaaaaccatctctaagaggatgagagttgatatcattaatcactctatagtaacgcgtggaaaaagctctatattacaaactatagaaattatttttactaatagaacatgtgtgaaaatattcaaggattctactatgcacattattctatccaaggacaaggatgaaaaggggtgtatacacatgattgacaaattattctatgtctattataatttatttctgttgttcgaagatatcatccaaaacgagtactttaaagaagtagctaatgttgtaaaccacgtactcacggctacggcattagatgagaaattattcctaattaagaaaatggctgaacacgatgtttatggagttagcaatttcaaaatagggatgtttaacctgacatttattaagtcgttggatcataccgttttcccctctctgttagatgaggatagcaaaataaagttttttaaggggaaaaagctcaatattgtagcattacgatctctggaggattgtataaattacgtgactaaatccgagaatatgatagaaatgatgaaggaaagatcgactattttaaatagcatagatatagaaacggaatcggtagatcgtctaaaagaattgcttctaaaatgaaaaaaaacactgattcagaaatggatcaacgactcggatataagtttttggtgcctgatcctaaagccggagttttttatagaccgttacatttccaatatgtatcgtattctaattttatattgcatcgattgcatgaaatcttgaccgtcaagcggccactcttatcgtttaagaataatacagaacgaattatgatagaaattagcaatgttaaagtgactcctccagattactcacctataatcgcgagtattaaaggtaagagttatgacgcattagccacgttcactgtaaatatctttaaagaggtaatgaccaaagagggtatatccatcactaaaataagtagttatgagggaaaagattctcatttgataaaaattccgctactaataggatacgggaataaaaatccacttgatacagccaagtatcttgttcctaatgtcataggtggagtctttatcaataaacaatctgtcgaaaaagtaggaattaatctagtagaaaagattacaacatggccaaaatttagggttgttaagccaaactcattcactttctcgttttcctccgtatcccctcctaatgtattaccgacaagatatcgccattacaagatatctctggatatatcacaattggaagcgttgaatatatcatcgacaaagacatttataacggtcaatattgttttgctgtctcaatatttatctagagtgagtctagaattcattagacgtagtttatcatacgatatgcctccagaagttgtctatctagtaaacgcgataatagatagtgctaaacgaattactgaatctattactgactttaatattgatacatacattaatgacctggtggaagctgaacacattaaacaaaaatctcagttaacgattaacgagttcaaatatgaaatgctgcataactttttacctcatatgaactatacacccgatcaactaaagggattttatatgatatctttactaagaaagtttctctactgtatcttccacacttctagatatccagatagagattcgatggtttgtcatcgcatcctaacgtacggcaaatattttgagacgttggcacatgatgaattagagaattacataggcaacatccgaaacgatatcatgaacaatcacaagaacagaggcacttacgcggtaaacattcatgtactaacaactcccggacttaatcacgcgttttctagcttattgagtggaaagttcaaaaagtcagacggtagttatcgaacacatcctcactattcatggatgcagaatatttctattcctaggagtgttggattttatccggatcaagtaaagatttcaaagatgttttctgtcagaaaataccatccaagtcaatatctttacttttgttcatcagacgttccggaaagaggtcctcaggtaggtttagtatctcaattgtctgtcttgagttccattacaaatatactaacgtctgagtatttggatttggaaaagaaaatttgtgagtatatcagatcatattataaagatgatataagttactttgaaacaggatttccaatcactatagaaaatgctctagtcgcatctcttaatccaaatatgatatgtgattttgtaactgactttagacgtagaaaacggatgggattcttcggtaacttggaggtaggtattactttagttagggatcacatgaatgaaattcgcattaatattggagcgggaagattagtcagaccattcttggttgtggataacggagagctcatgatggatgtgtgtccggagttagaaagcagattagacgacatgacattctctgacattcagaaagagtttccgcatgtcatcgaaatggtagatatagaacaatttacttttagtaacgtatgtgaatcggttcaaaaatttagaatgatgtcaaaggatgaaagaaagcaatacgatttatgtgactttcctgccgaatttagagatggatatgtagcatcttcactagtgggaatcaatcacaattctggacccagagctattcttggatgtgctcaagctaaacaagctatctcttgtctgagttcggatatacgaaataaaatagacaatggaattcatttgatgtatccagagaggccaatcgtgattagtaaggctttagaaacttcaaagattgcggctaattgcttcggccaacatgttactatagcattaatgtcgtacaaaggtatcaatcaagaggatggaattatcatcaaaaaacaatttattcagagaggcggtctcgatatagttaccgcaaagaaacatcaagtagaaattccattggaaaactttaataacaaagaaagagataggtctaacgcctattcaaaattagaaagtaatggattagttagactgaatgctttcttggaatccggagacgctatggcacgaaatatctcatcaagaactcttgaagatgattttgctagagataatcagattagcttcgatgtttccgagaaatataccgatatgtacaaatctcgcgttgaacgagtacaagtagaacttactgacaaagttaaggtacgagtattaaccatgaaagaaagaagacccattctaggagacaaatttaccactagaacgagtcaaaagggaacagtcgcgtatgtcgcggatgaaacggaacttccatacgacgaaaatggtatcacaccagatgtcattattaattctacatccatcttctctagaaaaactatatctatgttgatagaagttattttaacagccgcatattctgctaagccgtacaacaataagggagaaaaccgacctgtctgttttcctagtagtaacgaaacatccatcgatacatatatgcaattcgctaaacaatgttatgagcattcaaatccgaaattgtccgatgaagaattatcggataaaatcttttgtgaaaagattctctatgatcctgaaacggataagccttatgcatccaaagtattttttggaccaatttattacttgcgtctgaggcatttaactcaggacaaggcaaccgttagatgtagaggtaaaaagacgaagctcattagacaggcgaatgagggacgaaaacgtggaggaggtatcaagttcggagaaatggagagagactgtttaatagcgcatggtgcagccaatactattacagaagttttgaaagattcggaagaagattatcaagatgtgtatgtttgtgaaaattgtggagacatagcagcacaaatcaagggtattaatacatgtcttagatgttcaaaacttaatctctctcctctcttaacaaaaattgataccacgcacgtatctaaagtatttcttactcaaatgaacgccagaggcgtaaaagtcaaattagatttcgaacgaaggcctccttcgttttataaaccattagataaagttgatctcaagccgtcttttctggtgtaatattctagtttggtagtagatacatatcaatatcatcaaattcgagatccgaattataaaatgggcgtggattgttaactatagaatcggacgtctgatattcgaaaatctgtggagtttcaggttttggtggaggtgtaactgctacttgggatactgaagtctgatattcagaaagctgtggatgttctggttcggcatccaccgatggtgtcacatcactaatcggttcggtaacgtctgtggatggaggtgctacttctacagaacctgtagcctcagttgtcaacggagatacatttttaatgcgagaaaatgtataatttggtaatggtttcttatgtggatctgaagaagaggtaagatatctactagaaagataccgatcacgttctagttctcttttgtagaacttaactttttctttctccgcatctagttgatattccaacctcttcacgttactacgttcagattccaattcacgttcgcatgggttacctccgcagtttttacgagcgatttcacgttcagccttcatgcgtctctccctctctctatcgagtttatcagagcagtctttctgaaggcgatcgaactccataaatttctccaacgctttgattgtttccatagatttccgaagttcagcttttaggactgtgattctttttctttcgaattcacagctggatgtacaaccgtttccattaccgccatctctaagtttcttttctagatcggcaacatttcatccccatgccttttacattcctcgagtctactgtcgtcgaaatatcgttccagctccttttcgacatcaataactttagcacgttgtctctcaagctctcttttgtagttatctgattccctggcacgtttaagatcttcatgcaattgagtcagctcttaacttcctctcttgcttcttcgtcatagtacgcgcaatcactgtgagatccattgttaccacgtctacactcggcgagctcgcgtttaagagattcaatttcccgtttgtattggtccatgtttccattgctaccaccattagatttacaggctgctagttgtcgttcgagatcagaaatacgggttttcttggaattgatttcgtcgatgtacttggcatcgaaacacttattaagttctttttccaattctacgattttatttctttcgcgagtcaattccctcctgtagtaactatctgttttgtcagattcacgctctctacgtagactttcttgcaagttactaatttgttccctagcacgtccgagtttagttttatatgctgaatagagttctgattcatcctttgagcagatctctagcgatcgtttaagattcctaattctagtctttagcctatttacctcctcagaagatgttccgttaccgttgcgtttacactcgttaagctgtctatcaagatccatgattctatctctaagacgttgcatctctctttccatatcagcattgctttcattattacgtctgcagtcactcaactgtctttcaatatctgagattctatctctaagacgtcgcatctctctctgtttcggcattggtttcattattacgtctacagtcgttcaactgtctttcaagatctgatattctagattggagtctgctaatctctgtagcattttcacggcattcactcagttgtctttcaagatctgaaattttagattggagtctgctaatctctgtaagatttcctcctccgctctcgatgcagtcggtcaacttattctctagttctctaatacgcgaacgcagtgcatcaacttcttgcgtgtcttcctggttgcgtgtacattcatcgagtctagattcgagatctctaacgcgtcgtcgttcttcctcaagttctctgcgtactacagaaagcgtgtccctatcttgttgatatttagcaatttctgattctagagtactgattttgcttacgtagttactaatatttgtcttggccttatcaagatcctccttgtatttgtcgcattccttgatatccctacgaagtctggacagttcccattcgacattacgacgtttatcgatttcagctcggagatcgtcatcgcgttgttttagccacatacgactgagttcaagttctcgttgacaagatccatctacttttccattcctaatagtatccagttccttttctagttctgaacgcatttctcgttccctatcaagcgattctctcaattctcggatagtcttcttatcaatttctaataaatctgaaccatcatctgtcccattttgaatatccctgtgttctttgatctcttttgtaagtcggtcgattctttcggttttataaacagaatccctttccaaagtcctaatcttactgagtttatcactaagttctgcattcaattcggtgagttttctcttggcttcttccaactctgttttaaactctccactatttccgcattcttcctcgcatttatctaaccattcaattagtttattaataactagttggtaatcagcgattcctatagccgttcttgtaattgtgggaacataattaggatcttctaatggattgtatggcttgatagcatcatctttatcattattagggggatggacaaccttaattggttggtcctcatctcctccagtagcgtgtggttcttcaataccagtgttagtaataggcttaggcaaatgcttgtcgtacgcgggcacttcctcatccatcaagtatttataatcgggttctacttcagaatattcttttctaagagacgcgacttcgggagttagtagaagaactctgtttctgtatctatcaacgctggaatcaatactcaagttaaggatagcgaatacctcatcgtcatcatccgtatcttctgaaacaccatcatatgacatttcatgaagtctaacgtattgataaatagaatcagatttagtattaaacagatccttaacctttttagtaaacgcatatgtatattttagatctccagatttcataatatgatcacatgccttaaatgtcagtgcttccatgatataatctggaacactaatgggtgacgaaaaagatacagcaccatatgctacgttgataaataaatctgaaccactaagtagataatgattaatgttaagaaagaggaaatattcagtgtataggtatgtcttggcgtcatatcttgtactaaacacgctaaacagtttgttaatgtgatcaatttccaatagattaattagagcagcgggaataccaacaaacatattaccacatccgtattttctatgaatatcacatatcatgttaaaaaatcttgatagaagagcgaatatctcgtctgacttaatgagtcgtagttcagcagcaacataagtcataactgtaaatagaacatactttcctgtagtgttgattctagactccacatcaacaccattattaaaaatagttttatatacatctttaatctgctctccgttaatcgtcgaacgttctagtatacggaaacactttgatttcttatctgtagttaatgacttagtgatatcacgaagaatattacgaattacatttcttgtttttcttgagagacctgattcagaactcaactcatcgttccatagtttttctacctcagtggcgaaatctttggagtgcttggtacatttttcaataaggttcgtgacctccatttattataaaaaatttattcaaaacttaactacaatcgggtaattataaaatcgtagatctcccatgtggcggaatactaccatctatcgcatgtggatggacagtaggtaatggccatgggaacagtaatgtttgcatatttatctttcttgccagtattactgcatattgtcccaatgtttcgatgtgatgttctaacctatcaactgccgctgtatcacaacaatagtgtccgatgaaattaagattatgatccaatgtgtttaatatatgattatcaagtcttatacgatccgcgtcttttttgacaggatcaggttcttctacaggaagaagtttcggcctcttatgatattcatgtctgggaaacggtggtctagggtgaggctccggtatcggagtgggttttggattataatcatcatcgtctatgacatcatcttcgacttcgatatttattttgctatcttgatgatgtcctgtatcagttgcattttcagcactcgactgaatattagcgcattcattgtctattattaccatatttctaaacccaaaatgtatgtgttgaacatcagtactatcgttgatgagtcttatagcatgaattcgcttatcgttatcgggtttatcttctgtcaccttagcaattccttttttattaaactctacataatcatatccatttctattgtttgttctaatataaacgagtatagcatcattgctaaatttttcaatagtatcaaaaacagaatatcctaaaccatataatatatattcaggaacactcaaactaaatgtccaggattctcctaaatacgtaaactttaatagtgcgaaatcattcaaaaatctaccacttatagatagatagtacataaatgcgtatagtagtctacctatctctttattatgaaaaccggcattacgatcatatatgtcgtgatatacctgtgatccgtttacgttaaaccataaatacatgggtgatcctataaacatgaatttatttctaattctcagagctatagttaattgaccgtgtaatatttgcttacatgcatacttgatacgcttattaataagatttttatcattgctcgttatttcagaatcgtatatataaggagtaccatcgtgattcttaccagatattatacaaaatactatatataaaatatattgaccaacgttagtaatcatataaatgtttaacgttttaaattttgtattcaatgatccattatcatacgctagcatggtcttatgatattcattctttaaaatataatattgtgttagccattgcattggggctcctaatggagattttttattctcatccattttaggataggctttcataaagtccctaataacttcgtgaataatgtttctatgttttctactgatgcatgtatttgcttcgatttttttatcccatgtttcatctatcatagatttaaacgcagtaatgctcgcaacattaacatcttgaaccgttggtacaattccgttccataaatttataatgttcgccatttatataactcattttttgaatatacttttaattaacaaaagagttaagttactcatatggacgccgtccagtctgaacatcaatctttttagccagagatatcatagccgctcttagagtttcagcgtgattttccaacctaaatagaacttcatcgttgcgtttacaacacttttctatttgttcaaactttgttgttacattagtaatctttttttccaaattagttagccgttgtttgagagtttcctcattgtcgtctccatcggctttaacaattgcttcgcgtttagcctctggctttttagcagcctttgtagaaaaaaattcagttgctggaattgcaagatcgtcatctccggggaaaagagttccgtccatttaaagtacagattttagaaactgacactctgcgttatttatatttggtacaacacatggattataaatattgatgttaataacatcagaaaatgtaaagtctatacattgttgcatcgtgttaaattttctaatggatctagtattattgggtccaacttctgcctgaaatccaaatatggaagcggatacaaaaccgtttcctggataaaccacacatctccacttttgctttacatcagaaattgtgtcgttgacatcttgaactctcctatctaatgccggtgttccacctatagattttgaatattcgaatgctgcatgagtagcattaaattccttaatattgccataattttcatatattgagtaaccctggataaaaagtaaacacaccgcagccgtcgctaccacaataaaaaaaattgatagagagttcatttataatctattagaagctgacaaaatttttttacacgcatcagacaatgctttaataaatagttcaacatctacttttgtcatatcgaaccgatggtatgattctaacctagaattacatccgaaaaagttgactatgttcatagtcattaagtcattaacaaacaacattccagactctggattataagacgatactgtttcgtcacaattacctaccttaatcatgtgattatgaatattggctattagagcaccttctaagaaatctataatatctttgaaacacgatttaaaatcaaaccacgaatatacttctacgaagaaagttagtttacccataggagaaataactataaatggagatctaaatacaaaatccggatctatgatagttttaacattattatattctctattaaatacctccacatctaaaaatgttaattttgaaactatgtcttcgtttattaccgtacctgaactaaacgctataagctctattgtttgagaactctttaaacgatattcttgaaatacatgtaacaaagtttcctttaactcggtcggtttatctaccatagttacagaatttgtatccttatctataatataataatcaaaatcgtataaagttatataattatcgcgttcagattgggatcttttcaaatagactaaaaaccccatttctctagtaagtatcttatgtatatgtttgtaaaatatcttcatggtgggaatatgctctaccgcagttagccattcctcattgacagcggtagatgtattagacaaaactattccaatgtttaacaagggccattttacgagattattaaatccttgtttgataaatgtagccaatgagggttcgagttcaacgacgattgaattctcttcccgcggatgctgcatgatgaacgacgggatgttgttcgattgatttggaattctttttcgactttttgtttatattaaatattttaaaatttatagcggatagcaattcatgtaccacggataatgtagacgcgtattgcgcatcgatatctttattattagataaatttatcaataaatgtgagaagtttgcctcgttaaggtcttccatttaaatattatataaacatttgtgtttgtaacttattcgtcttttatggaatagttttttactagtaaagctgcaattacacactttgtccgtaaaacataaatataaacaccagcttttatcaatcgttccaaaaagtcgacggcggacatttttaacatggcatctattttaaatacacttaggtttttggaaaaaacatcattttataattgtaacgattcaataactaaagaaaagattaagattaaacataagggaatgtcatttgtattttataagccaaagcattctaccgttgttaaatacttgtctggaggaggtatatatcatgatgatttggttgtattggggaaggtaacaattaataatctaaagatgatgctattttacatggatttatcatatcatggagtgacaagtagtggagcaatttacaaattgggatcgtctatcgatagactttctctaaataggactattgttacaaaagttaataattatgatgatacattttttgacgacgatgattgatcgctattgcacaattttgtttttgtactttctaatatagtgtttaggttctttttcatatgagaatattgatttactaaaatatctatgtttaacttttgttctatgacgtccttatcggcggtatcggtacatatacgtaattcaccttcacaaaatacggagtcttcgataataatagccaatcgattattggatctagctgtctgtatcatattcaacatgtttaatatatcctttcgtttcccctttacaggcatcgatcgtagcatattttccgcgtctgatatggaaatgttaaaactacaaaaatgcgtaatgttagcccgtcctaatattggtacgtgtctataagtttggcatagtagaataatagacgtgtttaaatgccttccaaagtttaagaattctattagagtattgcattttgatagtttatcgcctacatcatcaaaaataagtaaaaagtgtgctgattttttatgattttgtgcgacagcaatacatttttctatgttacttttagttcgtatcagattatattctagagattcctgactactaacgaaattaatatgatttggccaaatgtatccatcataatctgggttataaacgggtgtaaacaagaatatatgtttatattttttaactagtgtagaaaacagagatagtaaatagatagtttttccagatccagatcctcctgttaaaaccattctaaacggcatttttaataaattttctcttgaaaattgtttttcttggaaacaattcataattatatttacagttactaaattaatttgataataaatcaaaatatggaaaactaaggttgttagtagggaggagaacaaagaaggcacatcgtgatataaataacatttattatcatgatgacaccagaaaacgacgaagagcagacatctgtgttctccgctactgtttacggagacaaaattcagggaaagaataaacgcaaacgcgtgattggtctatgtattagaatatctatggttatttcactactatctatgattaccatgtccgcgtttctcatagtgcgcctaaatcaatgcatgtctgctaacgaggctgctattactgacgccgctgttgccgttgctgctgcatcatctactcatagaaaggttgcgtctagcactacgcaatatgatcacaaagaaagctgtaatggtttatattaccagggttcttgttatatattacattcagactaccagttattctcggatgctaaagcaaattgcactgcggaatcatcaacactacccaataaatccgatgtcttgactacctggctcattgattatgttgaggatacatggggatctgatggtaatccaattacaaaaactacatccgattatcaagattctgatgtatcacaagaagttagaaagtatttttgtgttaaaacaatgaactaatatttatttttgtacattaataaatgaaatcgcttaatagacaaactgtaagtaggtttaagaagttgtcggtgccggccgctataatgatgatactctcaaccattattagtggcataggaacatttctgcattacaaagaagaactgatgcctagtgcttgcgccaatggatggatacaatacgataaacattgttatttagatactaacattaaaatgtctacagataatgcggtttatcagtgtcgtaaattacgagctagattgcctagacctgatactagacatctgagagtattgtttagtattttttataaagattattgggtaagtttaaaaaagaccaatgataaatggttagatattaataatgataaagatatagatattagtaaattaacaaattttaaacaactaaacagtacgacggatgctgaagcgtgttatatatacaagtctggaaaactggttaaaacagtatgtaaaagtactcaatctgtactatgtgttaaaaaattctacaagtgacaacaaaaaatgaattaataataagtcgttaacgtacgccgccatggacgccgcgtttgttattactccaatgggtgtgttgactataacagatacattgtatgatgatctcgatatctcaatcatggactttataggaccatacattataggtaacataaaaactgtccaaatagatgtacgggatataaaatattccgacatgcaaaaatgctactttagctataagggtaaaatagttcctcaggattctaatgatttggctagattcaacatttatagcatttgtgccgcatacagatcaaaaaataccatcatcatagcatgcgactatgatatcatgttagatatagaagataaacatcagccattttatctattcccatctattgatgtttttaacgctacaatcatagaagcgtataacctgtatacagctggagattatcatctaatcatcaatccttcagataatctgaaaatgaaattgtcgtttaattcttcattctgcatatcagacggcaatggatggatcataattgatgggaaatgcaatagtaattttttatcataaaagttgtaaagtaaataataaaacaataaatattgaactagtagtacgtatattgagcaatcagaaatgatgctggtacctcttatcacggtgaccgtagttgcgggaacaatattagtatgttatatattatatatttgtaggaaaaagatacgtactgtctataatgacaataaaattatcatgacaaaattaaaaaagataaagagttctaattccagcaaatctagtaaatcaactgatagcgaatcagactgggaggatcactgtagtgctatggaacaaaacaatgacgtagataatatttctaggaatgagatattggacgatgatagcttcgctggtagtttaatatgggataacgaatccaatgttatggcgcctagcacagaacacatttacgatagtgttgctggaagcacgctgctaataaataatgatcgtaatgaacagactatttatcagaacactacagtagtaattaatgaaacggagactgttgaagtacttaatgaagataccaaacagaatcctaactattcatccaatcctttcgtaaattataataaaaccagtatttgtagcaagtcaaatccgtttattacagaacttaacaataaatttagtgagaataatccgtttagacgagcacatagcgatgattatcttaataagcaagaacaagatcatgaacacgatgatatagaatcatcggtcgtatcattggtgtgattagtttcctttttataaaattgaagtaatatttagtattattgctgccgtcacgttgtacaaatggagatattccctgtattcggcatttctaaaattagcaattttattgctaataatgactgtagatattatatagatacagaacatcaaaaaattatatctgatgagatcaatagacagatggatgaaacggtacttcttaccaacatcttaagcgtagaagttgtaaatgacaatgagatgtaccatcttattcctcatagattatcgacgattatactctgtattagttctgtcggaggatgtgttatctctatagataatgacgtcaatggcaaaaatattctaacctttcccattgatcatgctgtaatcatatccccactgagtaaatgtgtcgtagttagcaagggtcctacaaccatattggttgttaaagcggatatacctagcaaacgattggtaacatcgtttacaaacgacatactatatgtaaacaatctgtcactgattaattatttgccgttgtctgtattcattattagacgagtcaccgactatttggatagacacatatgcgatcagatatttgctaataataagtggtattcccttataaccatcgacgataagcaatatcctattccatcaaactgtataggtatgtcctctgccaagtacataaattctagcatcgagcaagatactttaatccatgtttgtaacctcgagcatccgttcgactcagtatacaaaaaaatgcagtcgtacaattctctacctatcaaggaacaaatattgtacggtagaattgataatataaatatgagcattagtatttctgtggattaatagatttctagtatggggatcattaatcatctctaatctctaaatacctcataaaacgaaaaaaaagctattatcaaatactgtacggaatggattcattctcttctctttttatgaaactctgttgtatatctactgataaaactggaagcaaaaaatctgatagaaagaataagaataagatcaaggattatatggaacacgattattataaaataacaatagttcctggttcctcttccacgtctactagctcgtggtattatacacatgcctagtaatagtctctttgcgttgacggaaagcagactagaaataacaggctaaaatgttcagacaccataatagttcccaacccagataataacagagttccatcaacacattcctttaaactcaatcccaaacccaaaaccgttaaaatgtatccggccaattgatagtagataatgaggtgtacagcgcatgataatttacacagtaaccaaaatgaaaacactttagtaattataagaaatatagacggtaatgtcatcatcaacaatccgataatatgcctgagagtaaacattgatggataaaacaaaaatgctccgcataactctatcatggcaataacacaaccaaacacttgtaaaattcctaaattagtagaaaatacaacgaatatcgatgtataagtgatctcgagaaataataagaataaagtaatgcccgtaaagataaacatcaacattgtttggtaatcattaaaccaattagtatgaagttgaactaatttcacagtagattttattccagtgttatcctcgcatgtataagtacctggtaagatatctttatattccataatcaatgagacatcactatctgataacgaatgaagtctagcactagtatgccatttacttaatattgtcgtcttggaagttttattataagttaaaatatcatggttatccaatttccatctaatatactttgtcggattatctatagtacacggaataatgatggtatcattacatgctgtatactctatggtctttgtagttgttataacaaccaacgtatagaggtatatcaacgatattctaactcttgacattttttatttatttaaaatgatacctttgttatttattttattctattttgctaacggtattgaatggcataagtttgaaacgagtgaagaaataatttctacttacttattagacgacgtattatacacgggtgttaatggggcggtatacacattttcaaataataaactaaacaaaactggtttaactaataataattatataacaacatctataaaagtagaggatgcggataaggatacattagtatgcggaaccaataacggaaatcccaaatgttggaaaatagacggttcagacgacccaaaacatagaggtagaggatacgctccttatcaaaatagcaaagtaacgataatcagtcacaacggatgtgtactatctgacataaacatatcaaaagaaggaattaaacgatggagaagatttgacggaccatgtggttatgatttattcacggcggataacgtaattccaaaagatggtttacgaggagcattcgtcgataaagacggtacttatgacaaagtttacattcttttcactgatactatcggctcaaagagaattgtcaaaattccgtatatagcacaaatgtgcctaaacgacgaaggtggtccatcatcattgtctagtcatagatggtcgacgtttctcaaagtcgaattagaatgtgatatcgacggaagaagttatagacaaattattcattctagaactataaaaacagataatgatacgatactatatgtattcttcgatagtccttattccaagtccgcattatgtacctattctatgaataccattaaacaatctttttctacgtcaaaattggaaggatatacaaagcaattgccgtctccagctcctggtatatgtttaccagctggaaaagttgttccacataccacgtttgaagtcatagaacaatataatgtactagatgatattataaagcctttatctaaccaacctatcttcgaaggaccgtctggtgttaaatggttcgatataaaggagaaggaaaatgaacatcgggaatatagaatatacttcataaaagaaaattctatatattcgttcgatacaaaatctaaacaaactcgtagctcgcaagtcgatgcgcgactattttcagtaatggtaactgcgaaaccgttatttatagcagatatagggataggagtaggaatgccacaaatgaaaaaaatacttaaaatgtaatcttaatcgagtacaccacacgacaatgaacaaacataagacagattatgctggttatgcttgctgcgtaatatgcggtctaattgtcggaattatttttacagcgacactattaaaagttgtagaacgtaaattagttcatacaccattaatagataaaacgataaaagatgcatatattagagaagattgtcctactgactggataagctataataataaatgtatccatttatctactgatcgaaaaacctgggaggaaggacgtaatgcatgcaaagctctaaattcaaattcggatctaattaagatagagactccaaacgagttaagttttttaagaagccttagacgaggctattgggtaggagaatccgaaatattaaaccagacaaccccatataattttatagctaagaatgccacgaagaatggaactaaaaaacggaaatatatttgtagcacaacgaatactcccaaactgcattcgtgttacactatataacaattacactacatttttatcataccactacttcggttagatgttttagaaaaaaataaatatcgccgtaccgttcttgtttttataaaaataacaattaacaattatcaaattttttctttaatattttacgtggttgaccattcttggtggtaaaataatctcttagtgttggaatggaatgctgtttaatgtttccacactcatcgtatattttgacgtatgtagtcacatcgtttacgcaatagtcagactgtagttctatcatgcttcctacatcagaaggaggaacagttttaaagtctcttggttttaatctattaccgttagttttcatgaaatcctttgttttatccacttcacattttaaataaatgtccactatacattcttttgttaattttactagatcgtcatgggtcatagaatttataggttccgtagtccatggatccaaactagcaaacttcgcgtatacggtatcgcgattagtgtatacaccaactgtatgaaaattaagaaaacagtttaataaatcaacagaaatatttaatcctccgtttgatacagatgcgccatatttatggatttcggattcacacgttgtttgtctgaggtgttcgtctagtgttgcttctacgtaaacttcgattcccatatattctttattgtcagaatcgcataccgatttatcatcatacactgtttgaaaactaaatggtatacacatcaaaataataaataataacgagtacattctgcaatattgttatcgtaattggaaaaatagtgttcgagtgagttggattatgtgagtattggattgtatattttattttatattttgtaataagaataaaatgctaatgtcaagtttattccaatagatgtcttattaaaaacatatataataaataacaatggctgaatggcataaaattatcgaggatatctcaaaaaataataagttcgaggatgccgccatcgttgattacaagactacaaagaatgttctagctgctattcctaacagaacatttgccaagattaatccgggtgaaattattcctctcatcactaatcgtaatattctaaaacctcttattggtcagaaatattgtattgtatatactaactctctaatggatgagaacacgtatgctatggagttgcttactgggtacgcccctgtatctccgatcgttatagcgagaactcataccgcacttatatttttgatgggtaagccaacaacatccagacgtgacgtgtatagaacgtgtagagatcacgctacccgtgtacgtgcaactggtaattaaaataaaaagtaatattcatatgtagtgtcaattttaaatgatgatgatgaaatggataatatccatattgacgatgtcaataatgccggtattggcatacagttcatcgatttttagatttcattcagaggatgtggaattatgttatgggcatttgtattttgataggatctataatgtagtaaatataaaatataatccgcatattccatatagatataattttattaatcgcacgttaaccgtagatgaactagacgataatgtcttttttacacatggttattttttaaaacacaaatatggttcacttaatcctagtttgattgtctcattatcaggaaacttaaaatataatgatatacaatgctcagtaaatgtatcgtgtctcattaaaaatttggcaacgagtacatctactatattaacatctaaacataagacttattctctacatcggtccacgtgtattactataataggatacgattctattatatggtataaagatataaatgacaagtataatgacatctatgattttactgcaatatgtatgctaatagcgtctacattgatagtgaccatatacgtgtttaaaaaaataaaaatgaactcttaattatgctatgctattagaaatggataaaatcaaaattacggttgattcaaaaattggtaatgttgttaccatatcgtataacttggaaaagataactattgatgtcacacctaaaaagaaaaaagaaaaggatgtattattagcgcaatcagttgctgtcgaagaggcaaaagatgtcaaggtagaagaaaaaaatattatcgatattgaagatgacgatgatatggatgtagaaagcgcgtaatacgatctataaaaataagtatataaatactttttatttactgtactcttactgtgtagtggtgataccctactcgattatttttttaaaaaaaaaatacttattctgattcttctagccatttccgtgttcgtttgaatgccacatcgacgtcaaagataggggagtagttgaaatctagttctgcattgttggtacgcacctcaaatgtagtgttggatatcttcaacgtatagttgttgagtagtgatggttttctaaatagaattctcttcatatcattcttgcacgcgtacatttttagcatccatcttggaatcctagatccttgttctattcccaatggtttcatcaatagaagattaaacatatcgtacgaacacgatggagagtaatcgtagcaaaagtaagcatttcctttaatctcagatcccggatactggatatattttgcagccaacacgtgcatccatgcaacatttcctacatatacccggctatgcaccgcgtcatcatcgactgtacgatacataatgttaccgtgttgcttacattgctcgtaaaagactttcatcaatttgtctccttctccgtaaattccagtgggtcttaggcaacaagtatacaattttgctccattcatgattacggaattattggctttcataaccagttgctcggccatacgtttactttttgcgtatacatgtcctggtgatatatcataaagggtatgctcatggccgatgaatggatcaccgtgtttattgggtcctattgcttccatgctactagtatagatcaaatacttgattcctaggtccacacaagctgccaaaatagtctgtgttccataatagtttactttcatgatttcattatcggtgtattttccaaatacatccactagagcagccgtatgaataatcagatttaccccatctagcgcttctctcaccttatcaaagtcgtttatatcacattgtatatagtttataaccttaactttcgaggttattggttgtggatcttctacaatatctatgactctgatttcttgaacatcatctgcactaattaacagttttactatatacctgcctagaaatccggcaccaccagtaaccgcgtacacggccattgctgccactcataatatcagactacttattctattttactaaataatggctgtttgtataatagaccacgataatatcagaggagttatttactttgaaccagtccatggaaaagataaagttttaggatcagttattggattaaaatccggaacgtatagtttgataattcatcgttacggagatattagtcaaggatgtgattccataggcagtccagaaatatttatcggtaacatctttgtaaacagatatggtgtagcatatgtttatttagatacagatgtaaatatatttacaattattggaaaggcgttatctatttcaaaaaatgatcagagattagcgtgtggagttattggtatttcttacataaatgaaaagataatacattttcttacaattaacgagaatggcgtttgatatatcagttaatgcgtctaaaacaataaatgcattagtttacttttctactcagcaaaataaattagtcatacgtaatgaagttaatgatacacactacactgtcgaatttgatagggacaaagtagttgacacgtttatttcatataatagacataatgacaccatagaaataagaggggtgcttccagaggaaactaatattggttgcgcggttaatacgccggttagtatgacttacttgtataataagtatagttttaaactgattttagcagaatatataagacacagaaatactatatccggcaatatttattcggcattgatgacactagatgatttggctattaaacagtatggagacattgatctattatttaatgagaaacttaaagtagactccgattcgggactatttgactttgtcaactttgtaaaggatatgatatgttgtgattctagaatagtagtagctctatctagtctagtatctaaacattgggaattgacaaataaaaaatataggtgtatggcattagccgaacatatatctgatagtattccaatatctgagctatctagactacgatacaatctatgtaagtatctacgcgggcacactgagagcatagaggatgaatttgattattttgaagacgatgattcgtctacatgttctgccgtaaccgacagggaaacggatgtataatttttttttatagcgtgaaggatatgataaaaaatataattgttgtatttatcccattccaatcaccttatatgattctgtaacacaataaaggagtcttatagatgtatagaggtcagatactggtttgataaactgtttattccacataagtatgtttgactttatggttagacccgcatactttaacaaatcactgaaaattggagttaggtattgacctctcagaatcagttgccgttctggaacattaaatgtattttttatgatatactccaacgcatttatgtgggcatacaacaagtcattactaatggagtattccaagagttttagttgtctagtatttaacaagagaagagatttcaacagactgtttatgaactcgaatgccgcctcattgtcgcttatattgatgatgtcgaattctcccaatatcatcaccgatgagtagctcatcttgttatcgggatccaagttttctaaagatgtcattaaaccctcgatcatgaatggatttatcatcatcgtttttatgttggacatgagcttagtccgtttgtccacatctatagacgacgatttctgaattatttcatatatccctctctttaactccaggaacttgtcaggatggtctactttaatatgttctcgtctaagagatgaaaatctttggatggttgtacgcgacttttctctaaaggatgacgttgcccaagatcctctcttaaatgaatccatcttatccttggacaagatggacagtctattttccttagatggtttaatatttttgttacccatgatctataaaggtagacctaatcgtctcggatgacctatatatttattttcagttttattatacgcataaattgtaaaaaatatgttaggtttacaaaaatgtctcgtggggcattaatcgtttttgaaggattggacaaatctggaaaaacaacacaatgtatgaacatcatggaatctataccggcaaacacgataaaatatcttaactttcctcagagatccactgtcactggaaagatgatagatgactatctaactcgtaaaaaaacctataatgatcatatagttaatctattattttgtgcaaatagatgggagtttgcatcttttatacaagaacaactagaacagggaattactttaatagttgatagatacgcattttctggagtagcgtatgccgccgctaaaggcgcgtcaatgactctcagtaagagttatgaatctggattgcctaaacccgacttagttatattcttggaatctggtagcaaagaaattaatagaaacgtcggcgaggaaatttatgaagatgttacattccaacaaaaggtattacaagaatataaaaaaatgattgaagaaggagatattcattggcaaattatttcttctgaattcgaggaagatgtaaagaaggagttgattaagaatatagttatagaggctatacacacggttactggaccagtggggcaactgtggatgtaatagtgaaattacattttttataaatagatgttagtacagtgttataaatggatgaagcatattactctggcaacttggaatcagtactcggatacgtgtccgatatgcataccgaactcgcatcaatatctcaattagttattgccaagatagaaactatagataatgatatattaaacaaggacattgtaaattttatcatgtgtagatcaaacttggataatccatttatctctttcctagatactgtatatactattatagatcaagagaactatcagactgagttgattaattcattagacgacaatgaaattatcgattgtatagttaataagtttatgagcttttataaggataacctagaaaatatagtagatgctatcattactctaaaatatataatgaataatccagattttaaaactacgtatgcagaagtactcggttccagaatagccgatatagatattaaacaagtgatacgtaagaatatactacaattgtctaatgatatccgcgaacgatatttgtgaaaatattaaaaaaaaatactttttttattaaatgacgtcgcttcgcgaatttagaaaattatgctgtgatatatatcacgcatcaggatataaagaaaaatctaaattaattagagactttataacagatagggatgataaatatttgatcattaagctattgcttcccggattagacgatagaatttataacatgaacgataaacaaattataaaattatatagtataatatttaaacaatctcaggaagatatgctacaagatttaggatacggatatataggagacactattaggactttcttcaaagagaacacagaaatccgtccacgagataaaagcattttaactttagaagaagtggatagttttttaactacgttatcatccgtaactaaagaatcgcatcaaataaaattattgactgatatcgcatccgtttgtacatgtaatgatttaaaatgtgtagtcatgcttattgataaagatctaaaaattaaagcgggtcctcggtacgtacttaacgctattagtcctaatgcctatgatgtgtttagaaaatctaataacttgaaagagataatagaaaatgcatctaaacaaaatctagactctatatctatttctgttatgactccaattaatcccatgttagcggaatcgtgtgattctgtcaataaggcgtttaaaaaatttccatcaggaatgtttgcggaagtcaaatacgatggtgaaagagtacaagttcataaaaataataacgagtttgccttctttagtagaaacatgaaaccagtactctctcataaagtggattatctcaaagaatacataccgaaagcatttaaaaaagctacgtctatcgtattggattctgaaattgttcttgtagacgaacataatgtaccgctcccgtttggaagtttaggaatacacaaaaagaaagaatataaaaactctaacatgtgtttgttcgtgtttgactgtttgtactttgatggattcgatatgacggacattccattgtacgaacgaagatcttttctcaaagatgttatggttgaaatacccaatagaatagtattctcagagttgacgaatattagtaacgagtctcagttaactgacgtattggatgatgcactaacgagaaaattagaaggattggtcttaaaagatattaatggagtatacgaaccgggaaagagaagatggttaaaaataaagcgagactatttgaacgagggttccatggcagattctgccgatttagtagtactaggtgcttactatggtaaaggagcaaagggtggtatcatggcagtctttctaatgggttgttacgacgatgaatccggtaaatggaagacggttaccaagtgttcaggacacgatgataatacgttaagggagttgcaagaccaattaaagatgattaaaattaacaaggatcccaaaaaaattccagagtggttagtagttaataaaatctatattcccgattttgtagtagaggatccgaaacaatctcagatatgggaaatttcaggagcagagtttacatcttccaagtcccataccgcaaatggaatatccattagatttcctagatttactaggataagagaggataaaacgtggaaagaatctactcatctaaacgatttagtaaacttgactaaatcttaatagttacatacaaactgaaaattaaaataacactatttagttggtggtcgccatggatggtgttattgtatactgtctaaacgcgctagtaaaacatggcgaggaaataaatcatataaaaaatgatttcatgattaaaccatgttgtgaaagagtttgtgaaaaagtcaagaacgttcacattggcggacaatctaaaaacaatacagtgattgcagatttgccatatctggataatgcggtatccgatgtatgcaattcactgtataaaaagaatgtatcaagaatatccagatttgctaatttgataaagatagatgacgatgacaagactcctactggtgtatataattattttaaacctaaagatgccattcctgttattatatccataggaaaggatagagatgtttgtgaactattaatctcatcagacatatcgtgtgcatgcgtggagttaaattcatatcacgtagccattcttcccatggatgtttccttttttaccaaaggaaatgcatcattgattattctcctgtttgatttctctatcgatgcggcacctctcttaagaagtgtaaccgataataatgttattatatctagacaccagcgtatacatgacgagcttccgagttccaattggttcaagttttacataagtataaagtccgactattgttctatattatatatggttgttgatggatctgtgatgcatgcgatagctgataatagaactcacgcaattattagcaaaaatatattagacaatactacgattaacgatgagtgtagatgctgttattttgaaccacagattaggattcttgatagagatgagatgctcaatggatcatcgtgtgatatgaacagacattgtattatgatgaatttacctgatgtaggcgaatttggatctagtatgttggggaaatatgaacctgacatgattaagattgctctttcggtggctggtaatttaataagaaatcgagactacattcccgggagacgaggatatagctactacgtttacggtatagcctctagataatttttttaagcacgaaataaaaaacataattttaaaccaatctatttcatactattttgtgtgatcaccatggacataaagatagatattagtatttctggtgataaatttacggtgactactaggagggaaaatgaagaaagaaaaaaatatctacctctccaaaaagaaaaaactactgatgttatcaaacctgattatcttgagtacgatgacttgttagatagagatgagatgtttactattctagaggaatattttatgtacagaggtctattaggcctcagaataaaatatggacgactctttaacgaaattagaaaattcgacaatgatgcggaagaacaattcggtactatagaagaactcaagcagaaacttagattaaattctgaagagggagcagataactttatagattatataaaggtacaaaaacaggatatcgtcaaacttactgtatacgattgcatatctatgataggattgtgtgcatgcgtggtagatgtttggagaaatgagaaactgttttctagatggaaatattgtttacgagcgattaaactgtttattgatgatcacatgcttgataagataaaatctatactgcagaatagactagtatatgtggaaatgtcatagaaagttaaaagttaatgagagcaaaaatatataaggttgtattccatatttgttatttttttctgtaatagttagaaaaatacattcgatggtctatctatcagattattatgtgttataaggtactttttctcataataaactagagtatgagtaagatagtgtttttcaaaacatataaatctaaaattgatggatgagatatacagctattaatttcgaaaatatattttaatctgataactttaaacatggatttttgatggtggtttaacgttttaaaaaaagattttgttattgtagtatatgataatattaaaagatggatataaagaatttgctgactgcatgtactattttttacattactacattggctacggcagatatacctacttcgtcactgccacacgctccggtaaacggggcatgtgacgagggagaatatcttgataagaggcataatcaatgttgtaatcagtgtccacctggagaatttgccaaggtcagatgtagtggtagtgataacacaaaatgtgaacgctgcccacctcatacatataccgcaatccccaattactctaatggatgtcatcaatgtagaaaatgcccaacaggatcatttgataaggtaaagtgtaccggaacacagaacagtaaatgttcgtgtcttcctggttggtattgcgctactgattcttcacagactgaagattgtcgagattgtataccaaaaaggagatgtccatgcggatactttggtggaatagatgaacaaggaaatcctatttgtaaatcgtgttgtgttggtgaatattgcgactacctacgtaattatagacttgatccatttcctccatgcaaactatctaaatgtaattaattatgattttgatgataatgttaccatacattatatcgctacttggttagtgtattattcagtatgaagacctattaataattacttatcttttgacgatcttgttataattataatataaaaatacttatggcatagtaactcataattgctgacgcgataaattcgtaataatctgttttgttcaaaggaatctacaggcataaaaataaaaatataatttataatatactcttacagcgcgccatcatgaataacagcagtaaattaattgctgttattaatggatttagaaatagtggacgattttgtgatattaatatagttattaatgatgaaaggataaacgctcacagactcatcctatctggagcctccgaatatttttccattctgttttccaataattttatcgattctaatgaatacgaagttaatctaagtcatttagattatcaaagcgtaaacgatttgatcgattacatttatgggatacctttgagcctaactaacgataacgtgaaatatattctttcaaccgctgattttttacaaattggatctgctattacggagtgtgaaaattacatacttaaaaatctttgttctagaaactgtatcgatttctacatatacgctgataaatataataacaagaaaatagaatcagcgtcgtttaacacaatattacaaaatattttgagactcatcaacgatgaaaactttaaatacttaacagaggaatcaatgataaaaattttaagcgatgatatgttaaatataaaaaatgaggatttcgccccactaattctcattaaatggttagagagtactcaacaaccatgcaccgtcgagttacttaaatgcctcagaatatcattgctttccccacaagttataaaatcactttatagtcatcgactggttagttcaatctacgaatgtataacattcttaaacaatatagcattcttggatgaatcatttcctagataccatagcatcgagttgatatctatcggtataagtaattcgcatgataagatttccataaactgctacaatcataaaaaaaatacatgggaaatgatatcttcacgtagatataggtgtagtttcgcagtggccgtcctggataatattatttatatgatgggtggatatgatcagtccccgtatagaagttcaaaggttatagcgtacaatacatgtacaaattcttggatatatgatataccagagctaaaatatcctcgttctaattgtgggggactggctgatgacgaatacatttattgtataggcggcatacgcgatcaggattcatcgttgacatctagtattgatagatggaagccatcaaaaccatattggcagaagtatgctaaaatgcgcgaaccaaaatgtgatatgggggttgcgatgttaaacggattaatatatgttataggtggaatcgttaaaggtgacacgtgtaccgacgcactagagagtttatcagaagatggatggatgaagcatcaacgtcttccaataaaaatgtccaatatgtcgacgattgttcatgatggcaagatttatatatctggaggttacaacaatagtagtgtagttaatgtaatatcgaatttagtccttagctataattcgatatatgatgaatggaccaaattatcatcattaaacattcctagaattaatcccgctctatggtcagcgcataataaattatatgtaggaggaggaatatctgatgatgttcgaactaatacatctgaaacatacgacaaagaaaaagattgttggacattggataatggtcacgtgttaccacgcaattatataatgtataaatgcgaaccgattaaacataaatatccattggaaaaaacacagtacacgaatgattttctaaagtatttggaaagttttataggtagttgatagaacaaaatacataattttgtaaaaataaatcactttttatactaatatgacacgattaccaatacttttgttactaatatcattagtatacgctacaccttttcctcagacatctaaaaaaataggtgatgatgcaactctatcatgtaatcgaaataatacaaatgactacgttgttatgagtgcttggtataaggagcccaattccattattcttttagctgctaaaagcgacgtcttgtattttgataattataccaaggataaaatatcttacgactctccatacgatgatctagttacaactatcacaattaaatcattgactgctagagatgccggtacttatgtatgtgcattctttatgacatcgcctacaaatgacactgataaagtagattatgaagaatactccacagagttgattgtaaatacagatagtgaatcgactatagacataatactatctggatctacacattcaccggaaactagttctgagaaacctgattatatagataattctaattgctcgtcggtattcgaaatcgcgactccggaaccaattactgataatgtagaagatcatacagacaccgtcacatacactagtgatagcattaatacagtaagtgcatcatctggagaatccacaacagacgagactccggaaccaattactgataaagaagatcatacagttacagacactgtctcatacactacagtaagtacatcatctggaattgtcactactaaatcaaccaccgatgatacgtacaatgataatgatacagtaccaccaactactgtaggcggtagtacaacctctattagcaattataaaaccaaggactttgtagaaatatttggtattaccgcattaattatattgtcggccgtggcaatattctgtattacgtattatatatgtaataaacgttcacgtaaatacaaaacagagaacaaagtctagatttttgacttacataaatgtctgggatagtaaaatctatcatattgagcgggccatctggtttaggaaagacagccatagccaaaagactatgggaatatatttggatttgtggtgtcccataccactagatttcctcgtcctatggaacgagaaggtgtcgattaccattacgttaacagagaggccatctggaagggaatagccgccggaaactttctagaacatactgagtttttaggaaatatttacggaacttctaaaactgctgtgaatacagcggctattaataatcgtatttgtgtgatggatctaaacatcgatggcgttagaagtcttaaaaatacgtacctaatgccttactcggtgtatataagacctacctctcttaaaatggttgagaccaagcttcgttgtagaaacactgaagcggatgatgagattcatcgtcgtgtgatgttggcaaaaactgacatggatgaggcaggtgaagccggtctattcgacactattatcattgaagatgatgtgaatttagcatatagtaagttaattcagatactacaggaccgtattagaatgtattttaacactaattagagacttaagacttaaaacttgataattaataatataactcgtttttatatgtggctatttcaacgtctaatgtattagttaaatattaaaacttaccacgtaaaacttaaaatttaaaatgatatttcattgacagatagatcacacattatgaactttcaaggacttgtgttaactgacaattgcaaaaatcaatgggtcgttggaccattaataggaaaaggtggatttggtagtatttatactactaatgacaataattatgtagtaaaaatagagcccaaagctaacggatcattatttaccgaacaggcattttatactagagtacttaaaccatccgttatcgaagaatggaaaaaatctcacaatataaagcacgtaggtcttatcacgtgcaaggcatttggtctatacaaatccattaatgtggaatatcgattcttggtaattaatagattaggtgcagatctagatgcggtgatcagagccaataataatagattaccaaaaaggtcggtgatgttgatcggaatcgaaatcttaaataccatacaatttatgcacgagcaaggatattctcacggagatattaaagcgagtaatatagtcttggatcaaatagataagaataaattatatctagtggattacggattggtttctaaattcatgtctaatggcgaacatgttccatttataagaaatccaaataaaatggataacggtactctagaatttacacctatagattcgcataaaggatacgttgtatctagacgtggagatctagaaacacttggatattgtatgattagatggttgggaggtatcttgccatggactaagatatctgaaacaaagaattgtgcattagtaagtgccacaaaacagaaatatgttaacaatactgcgactttgttaatgaccagtttgcaatatgcacctagagaattgctgcaatatattaccatggtaaactctttgacatattttgaggaacccaattacgacaagtttcggcacatattaatgcagggtgtatattattaagtgtggtgtttggtcgataaaaattaaaaaataacttaatttattattgatctcgtgtgtacaaccgaaatcatggcgatgttttacgcacacgctctcggtgggtacgacgagaatcttcatgcctttcctggaatatcatcgactgttgccaatgatgtcaggaaatattctgttgtgttagtttataataacaagtatgacattgtaaaagacaaatatatgtggtgttacagtcaggtgaacaagagatatattggagcactgctgcctatgtttgagtgcaatgaatatctacaaattggagatccgatccatgatcaagaaggaaatcaaatctctatcatcacatatcgccacaaaaactactatgctctaagcggaatcgggtacgagagtctagacttgtgtttggaaggagtagggattcatcatcacgtacttgaaacaggaaacgctgtatatggaaaagttcaacatgattattctactatcaaagagaaggccaaagaaatgagtacacttagtccaggacctatcatcgattaccacgtctggataggagattgtatctgtcaagttactgctgtggacgtacatggaaaggaaattatgaaaatgagattcaaaaagggtgcggtgcttccgatcccaaatctggtaaaagttaaacttggggagaatgatacagaaaatctttcttctactatatcggcgacaccatcgaggtaaccacctctctggaagacagcgtgaataatgtactcatgaaacgtttggaaactatacgccatatgtggtctgttgtatatgatcattttgatattgtgaatggtaaagaatgctgttatgtgcatacgcatttgtctaatcaaaatcttataccgagtactgtaaaaacaaatttgtacatgaagactatgggatcatgcattcaaatggattccatggaagctctagagtatcttagcgaactgaaggaatcaggtggatggagtcccagaccagaaatgcaggaatttgaatatccagatggagtggaagacactgaatcaattgagagattggtagaggagttcttcaatagatcagaacttcaggctggtgaatcagtcaaatttggtaattctattaatgttaaacatacatctgtttcagctaagcaactaagaacacgtatacggcagcagcttccttctatactctcatcttttaccaacacaaagggtggatatttgttcattggagttgataataatacacacaaagtatttggattcacggtgggttacgactacctcagactgatagagaatgatatagaaaagcatatcaaaagactttgtgttgtgtatttctgtgagaagaaagaggacatcaagtacgcgtgtcgattcatcaaggtatataaacctggggatgaggctacctcgacatacgtgtgcgctatcaaagtggaaagatgctgttgtgctgtgtttgcagattggccagaatcatggtatatggatactaatggtatcaagaagtattctccagatgaatgggtgtcacatataaaattttaattaatgtaatagagaacaaataataaggttgtaatatcatatagacaataactaacaattaattagtaactgttatctcttttttaactaaccaactaactatatacctattaatacatcgtaattatagttcttaacatctattaatcattgattcgcttctttaattttttataaactaacattgttaattgaaaagggataacatgttacagaatataaattatatatggatttttttaaaaaggaaatacttgactggagtatatatttatctcttcattatatagcacgcgtgttttccaatttttccacatcccatataatacaggattataatctcgttcgaacatacgagaaagtggataaaacaatagttgattttttatctaggttgccaaatttattccatattttagaatatggggaaaatattctacatatttattctatggatgatgctaatacgaatattataattttttttctagatagagtattaaatattaataagaacgggtcatttatacacaatctcgggttatcatcatccattaatataaaagaatatgtatatcaattagttaataatgatcatccagataataggataagactaatgcttgaaaatggacgtagaacaagacattttttgtcctatatatcagatacagttaatatctatatatgtattttaataaatcatggattttatatagatgccgaagacagttacggttgtacattattacatagatgtatatatcactataagaaatcagaatcagaatcatacaatgaattaattaagatattgttaaataatggatcagatgtagataaaaaagatacgtacggaaacacaccttttatcctattatgtaaacacgatatcaacaacgtggaattgtttgagatatgtttagagaatgctaatatagactctgtagactttaatagatatacacctcttcattatgtctcatgtcgtaataaatatgattttgtaaagttattaatttctaaaggagcaaatgttaatgcgcgtaataaattcggaactactccattttattgtggaattatacacggtatctcgcttataaaactatatttggaatcagacacagagttagaaatagataatgaacatatagttcgtcatttaataatttttgatgctgttgaatctttagattatctattatccagaggagttattgatattaactatcgtactatatacaacgaaacatctatttacgacgctgtcagttataatgcgtataatacgttggtctatctattaaacaaaaatggtgattttgagacgattactactagtggatgtacatgtatttcggaagcagtcgcaaacaacaacaaaataataatggaagtactattgtctaaacgaccatctttgaaaattatgatacagtctatgatagcaattactaaacataaacagcataatgcagatttattgaaaatgtgtataaaatatactgcgtgtatgaccgattatgatactcttatagatgtacagtcgctacagcaatataaatggtatattttaagatgtttcgatgaaatagatatcatgaagagatgttatataaaaaataaaactgtattccaattagttttttgtatcaaagacattaatactttaatgagatacggtaaacatccttctttcgtgaaatgcactagtctcgacgtatacggaagtcgtgtacgtaatatcatagcatctattagatatcgtcagagattaattagtctattatccaagaagctggatcctggagataaatggtcgtgttttcctaacgaaataaaatataaaatattggaaaactttaacgataacgaactatccacatatctaaaaatcttataaacattattaaaatataaaatctaagtaggataaaatcacactacatcattgtttccttttagtgctcgacagtgtatactatttttaacgctcataaataaaaatgaaaacgatttccgttgttacgttgttatgcgtactacctgctgttgtttattcaacatgtactgtacccactatgaataacgctaaattaacgtctaccgaaacatcgtttaatgataaccagaaagttacgtttacatgtgatcagggatatcattctttggatccaaatgctgtctgtgaaacagataaatggaaatacgaaaatccatgcaaaaaaatgtgcacagtttctgattatgtctctgaactatataataaaccgctatacgaagtgaattccaccatgacactaagttgcaacggcgaaacaaaatattttcgttgcgaagaaaaaaatggaaatacttcttggaatgatactgttacgtgtcctaatgcggaatgtcaacctcttcaattagaacacggatcgtgtcaaccagttaaagaaaaatactcatttggggaatatatgactatcaactgtgatgttggatatgaggttattggtgcttcgtacataagttgtacagctaattcttggaatgttattccatcatgtcaacaaaaatgtgatatgccgtctctatctaacggattaatttccggatctacattttctatcggtggcgttatacatcttagttgtaaaagtggttttacactaacggggtctccatcatccacatgtatcgacggtaaatggaatcccatactcccaatatgtgtacgaactaacgaaaaatttgatccagtggatgatggtcccgacgatgagacagatttgagcaaactctcgaaagacgttgtacaatatgaacaagaaatagaatcgttagaagcaacttatcatataatcatagtggcgttgacaattatgggcgtcatatttttaatctccgttatagtattagtttgttcctgtgacaaaaataatgaccaatataagttccataaattgctaccgtaaatataaatccgttaaaataattaataatttaataacaaacaagtatcaaaagattaaagacttatagctagaatcaattgagatgtcttcttcagtggatgttgatatctacgatgccgttagagcatttttactcaggcactattataacaagagatttattgtgtatggaagaagtaacgccatattacataatatatacaggctatttacaagatgcgccgttataccgttcgatgatatagtacgtactatgccaaatgaatcacgtgttaaacaatgggtgatggatacacttaatggtataatgatgaatgaacgcgatattactgtaagcgttggcaccggaatactattcatggaaatgtttttcgattacaataaaaatagtatcaacaatcaactaatgtatgatataattaatagcgtatctataattctagctaatgagagatatagaagcgcttttaacgacgatggtatatacatccgtagaaatatgattaacaagttgtacggatacgcatctctaactactattggcacgatcgctggaggtgtttgttattatctgttgatgcatctagttagtttgtataaataattatttcaatatactagttaaaattttaagattttaaatgtataaaaaactaataacgtttttatttgtaataggtgcattagcatcctattcgaataatgagtacactccgtttaataaactgagtgtaaaactctatatagatggagtagataatatagaaaattcatatactgatgataataatgaattggtgttaaattttaaagagtacacaatttctattattacagagtcatgcgacgtcggatttgattccatagatatagatgttataaacgactataaaattattgatatgtataccattgactcgtctactattcaacgcagaggtcacacgtgtagaatatctaccaaattatcatgccattatgataagtacccttatattcacaaatatgatggtgatgagcgacaatattctattactgcagagggaaaatgctataaaggaataaaatatgaaataagtatgatcaacgatgatactctattgagaaaacatactcttaaaattggatctacttatatatttgatcgtcatggacatagtaatacatattattcaaaatatgatttttaaaaatttaaaatatattatcacttcagtgacagtagtcaaataacaaacaacaccatgagatatattataattctcgcagttttgttcattaatagtatacatgctaaaataactagttataagtttgaatccgtcaattttgattccaaaattgaatggactggggatggtctatacaatatatcccttaaaaattatggcatcaagacgtggcaaacaatgtatacaaatgtaccagaaggaacatacgacatatccgcatttccaaagaatgatttcgtatctttctgggttaaatttgaacaaggcgattataaagtggaagagtattgtacgggactatgcgtcgaagtaaaaattggaccaccgactgtaacattgactgaatacgacgaccatatcaatttgtacatcgagcatccgtatgctactagaggtagcaaaaagattcctatttacaaacgcggtgacatgtgtgatatctacttgttgtatacggctaacttcacattcggagattctaaagaaccagtaccatatgatatcgatgactacgattgcacgtctacaggttgcagcatagactttgtcacaacagaaaaagtgtgcgtgacagcacagggagccacagaagggtttctcgaaaaaattactccatggagttcgaaagtatgtctgacacctaaaaagagtgtatatacatgcgcaattagatccaaagaagatgttcccaatttcaaggacaaaatggccagagttatcaagagaaaatttaatacacagtctcaatcttatttaactaaatttctcggtagcacatcaaatgatgttaccacttttcttagcatgcttaacttgactaaatattcataactaatttttattaatgatacaaaaacgaaataaaactgcatattatacactggttaacgcccttataggctctaaccattttcaagatgaggtccctgattatagtccttctgttcccctctatcatctactccatgtctattagacgatgtgagaagactgaagaggaaacatggggattgaaaatagggttgtgtataattgccaaagatttctatcccgaaagaactgattgcagtgttcatctcccaactgcaagtgaaggattgataactgaaggcaatggattcagggatatacgaaacaccgataaattataaaaaaagcaatgtgtccgctgtttccgttaataatactattttcgtaactggcggattattcataaataactctaatagcacgatcgtggttaacaatatggaaaaacttgacatttataaagacaaacaatggtcgattatagaaatgcctatggctagggtatatcacggcatcgactcgacatttggaatgttatattttgccggaggtctatccgttaccgaacaatatggtaatttagagaaaaacaacgagatatcttgttacaatcctagaacgaataagtggtttgatatttcatatactatttataagatatccatatcatcattgtgtaaactaaataacgtcttctatgtatttagtaaggacattggatatgtggaaaagtatgatggtgcatggaagttagtacatgatcgtctccccgctataaaggcattatcaacttctccttattgattgaaaatgaaaatataaatagtttttatgtatagcagtattaccctatagttttattgcttactactaacatggatacagatgttacaaatgtagaagatatcataaatgaaatagatagagagaaagaagaaatactaaaaaatgtagaaattgaaaataataaaaacattaacaagaatcatccaagtggatatattagagaagcactcgttattaatactagtagtaatagtgattccattgataaagaagttatagaatgtatctgtcacgatgtaggaatatagatcatatctactaatttttataatcgatacaaaacataaaaaacaactcgttattacatagcaggcatggaatccttcaagtattgttttgataacgatggcaagaaatggattatcggaaatactttatattctggtaattcaatactctataaggtcagaaaaaatttcactagttcgttctacaattacgtaatgaagatagatcacaaatcacacaagccattgttgtctgaaatacgattctatatatctgtattggatcctttgactatcgacaactggacacgggaacgtggtataaagtatttggctattccagatctgtatggaattggagaaaccgatgattatatgttcttcgttataaagaattcgggaagagtattcgccccaaaggatactgaatcagtcttcgaagcatgcgtcactatgataaacacgttagagtttatacactctcaaggatttacccatggaaaaatagaaccgaggaatatactgattagaaataaacgtctttcactaattgactattctagaactaacaaactatacaagagtggaaactcacatatagattacaacgaggacatgataacttcaggaaatatcaattatatgtgtgtagacaatcatcttggagcaacagtttcaagacgaggagatttagaaatgttgggatattgcatgatagaatggttcggtggcaaacttccatggaaaaacgaaagtagtataaaagtaataaaacaaaaaaaagaatataaaaaatttatagctactttctttgaggactgttttcctgaaggaaatgaacctctggaattagttagatatatagaattagtatacacgttagattattctcaaactcctaattatgacagactacgtaaactgtttatacaagattgaaattatattcttttttttatagagtgtggtagtgttacggatatctaatattaatattagactatctctatcgcgctacacgaccaatatcgattactatggatatcttctatgaaaggagagaatgtatttatttctccagcgtcaatctcgtcagtattgacaatactgtattatggagctaatggatccactgctgaacagctatcaaaatatgtagaaacggaggagaacacggataaggttagcgctcagaatatctcattcaaatccatgaataaagtatatgggcgatattctgccgtgtttaaagattcctttttgagaaaaattggcgataagtttcaaactgttgacttcactgattgtcgcactatagatgcaatcaacaagtgtgtagatatctttactgaggggaaaatcaatccactattggatgaaccattgtctcctagcaattagtgccgtatactttaaagcaaaatggttgacgccattcgaaaaggaatttaccagtgattatcccttttacgtatctccgacggaaatggtagacgtaagtatgatgtctatgtacggcaaggcatttaatcacgcatctgtaaaagaatcattcggcaacttttcaatcatagaactgccatatgttggagatactagtatgatggtcattcttccagacaagattgatggattagaatccatagaacaaaatctaacagatacaaattttaagaaatggtgtgactttatggatgctatgtttatagatgttcacattcccaagtttaaggtaacaggctcgtataatctggtggatactctagtaaagtcaggactgacagaggtgttcggttcaactggagattatagcaatatgtgtaatttagatgtgagtgtcgacgctatgatccacaaaacgtatatagatgtcaatgaagagtatacagaagcagctgcagcaacttctgtactagtggcagactgtgcatcaacaattacaaatgagttctgtgcagatcatccgttcatctatgtgattaggcatgttgatggaaaaattcttttcgttggtagatattgctctccgacaactaattgttaaccattttttttaaaaaaaatagaaaaaacatgtggtattagtgcaggtcgttgttcttccaattgcaattggtaagatgacggccaactttagtacccacgtcttttcaccacagcactgtggatgtgacagactgaccagtattgatgacgtcaaacaatgtttgactgaatatatttattggtcgtcctatgcataccgcaacaggcaatgcgctggacaattgtattccacactcctctcttttagagatgatgcggaattagtgttcatcgacattcgcgagctggtaaaaaatatgccgtgggatgatgtcaaagattgtacagaaatcatccgttgttatataccggatgagcaaaaaaccatcagagagatttcggccatcatcggactttgtgcatatgctgctacttactggggaggtgaagaccatcccactagtaacagtctgaacgcattgtttgtgatgcttgagatgctaaattacgtggattataacatcatattccggcgtatgaattgatgagttgtacatcttgacattttctttcttctcttctccctttcttctcttctcccttcctccctcttctccctttcccagaaacaaacttttttacccactataaaataaaatgagtatactacctgttatatttctttctatatttttttattcttcattcgttcagacttttaacgcgtctgaatgtatcgacaaagggcaatattttgcatcattcatggagttagaaaacgagccagtaatcttaccatgtcctcaaataaatacgctatcatccggatataatatattagatattttatgggaaaaacgaggagcggataatgatagaattataccgatagataatggtagcaatatgctaattctgaacccgacacaatcagactctggtatttatatatgcattaccacgaacgaaacctactgtgacatgatgtcgttaaatttgacaatcgtgtctgtctcagaatcaaatatagattttatctcgtatccacaaatagtaaatgagagatctactggcgaaatggtatgtcccaatattaatgcatttattgctagtaacgtaaacgcagatattatatggagcggacatcgacgccttagaaataagagacttaaacaacggacacctggaattattaccatagaagatgttagaaaaaatgatgctggttattatacatgtgttttagaatatatatacggtggcaaaacatataacgtaaccagaattgtaaaattagaggtacgggataaaataataccttctactatgcaattaccagatggcattgtaacttcaataggtagtaatttgactattgcatcgttgagacctcccacaacggatgcagacgtcttttggataagtaatggtatgtattacgaagaagatgatggggacggaaacggtagaataagtgtagcaaataaaatctatatgaccgataagagacgtgttattacatcccggttaaacattaatcctgtcaaggaagaagatgctacaacgtttacgtgtatggcgtttactattcctagcatcagcaaaacagttactgttagtataacgtgaatgtatgttgttacatttccatgtcaattgagtttataagaatttttatacattatcttccaacaaacaattgacgaacgtattgctatgattaactcccacgatactatgcatattattaatcattaacttgcagactatacctagtgctattttgacatactcatgttcttgtgtaattgcggtatctatattattaaagtacgtaaatctagctatagttttattatttaattttagataatataccgtctccttatttttaaaaattgccacatcctttattaaatcatgaatgggaatttctatgtcatcgttagtatattgtgaacaacaagagcagatatctataggaaagggtggaatgcgatacattgatctatgtagttttaaaacacacgcgaactttgaagaatttatataaatcattccatcgatacatccttctatgttgagatgtatatatccaggaattcgtttattaatatcgggaaatgtataaactaaaacattgcccgaaagcggtgcctctatctgcgttatatccgttcttaacttacaaaatgtaaccaatacctttgcatgacttgttttgttcggcaacgttagtttaaacttgacgaatggattaattacaatagcatgatccgcgcatctattaagtttttttactttaacgcccttgtatgtttttacagagactttatctaaatttctagtgcttgtatgtgttataaatataacgggatatagaaccgaatcacctaccttagatacccaattacattttatcagatccagataataaacaaattttgtcgccctaactaattctatattgttatatattttacaattggttatgatatcatgtaataacttggagtctaacgcgcatcgtcgtacgtttatacaattgtgatttagtgtagtatatctacacatgtatttttccgcactatagtattctggactagtgataaaactatcgttatatctatcttcaatgaactcatcgagatattgctctctgtcatattcatacacctgcataaactttctagacatcttacaatccgtgttattttaggatcatatttacatatttacgggtatatcaaagatgttagattagttaatgggaatcgtctataataatgaatattaaacaattatatgaggacttttaccacaaagcatcataaaaatgagtcgtcgtctgatttatgttttaaatatcaaccgcaaatcaactcataaaatacaagagaatgaaatatatacatattttagtcattgcaatatagaccatacttctacagaacttgattttgtagttaaaaactatgatctaaacagacgacaacctgtaactgggtatactgcactacactgctatttgtataataattactttacaaacgatgtactgaagatattattaaatcatggagtggatgtaacgatgaaaaccagtagcggacgtatgcctgtttatatattgcttactagatgttgtaatatttcacatgatgtagtgatagatatgatagacaaagataaaaaccacttattacatagagactattccaacctattactagagtatataaaatctcgttacatgttattaaaggaagaggatatcgatgagaacatagtatccactttattagataagggaatcgatcctaactttaaacaagacggatatacagcgttacattattattatttgtgtctcgcacacgtttataaaccaggtgagtgtagaaaaccgataacgataaaaaaggccaagcgaattatttctttgtttatacaacatggagctaatctaaacgcgttagataattgtggtaatacaccattccatttgtatcttagtattgaaatgtgtaataatattcatatgactaaaatgctgttgacttttaatccgaatttcgaaatatgtaataatcatggattaacgcctatactatgttatataacttccgactacatacaacacgatattcttgttatgttaatacatcactatgaaacaaatgttggagaaatgccgatagatgagcgtcgtatgatcgtattcgagtttatcaaaacatattctacacgtccggcagattcgataacttatttgatgaataggtttaaaaatataaatatttatacccgctatgaaggaaagacattattacacgtagcatgtgaatataataatacacacgtaatagattatcttatacgtatcaacggagatataaatgcgttaaccgacaataacaaacacgctacacaactcattatagataacaaagaaaattccccatataccattaattgtttactgtatatacttagatatattgtagataagaatgtgataagatcgttggtggatcaacttccatctctacctatctttcgtcgcttatcatactagtcatatcctaaatgttgatcatattccaccaaatgattgtgaaagagattgagattaaatcgtctaacaaacaattagtttttatgacattaacatataataaataaattaatcattattgacttaacgatgacgaaagttatcatcatcttaggattcttgattattaatacaaattcattgtctatgaaatgtgaacaaggtgtctcatattataattcacaagaattaaagtgttgtaaactatgtaagccaggaacatattcagatcatcgatgtgataaatacagcgataccatttgtggacattgtccgagtgacacattcacgtcaatatataatcgttctccttggtgtcatagttgtagaggtccatgtggtactaatcgagtagaggtcacaccttgtacacctaccacaaatagaatctgtcattgtgactcgaatagttattgtctccttaaagcttctgatggtaactgtgttacatgtgctcctaaaacaaaatgtggtcgtgggtatggaaagaaaggagaagatgaaatgggtaataccatttgtaagaaatgtcggaagggtacttattcagatattgtatctgactctgatcaatgtaaaccaatgacaagataagacttactcgcatctactggatagacataaaatatcctcctcgtaataatgaaatataaatatacactaattattaatatcaataacaatcgagtattaatatataggtcatttttaaatcccttttgggttccgtcccaaacggcgtttcggtctgcgtcgccgccatggccatgccgagcctctccgcgtgctcctccatcgaggacgacttcaactatggcagctcggtggcgtctgccagcgtgcacatacgaatggcatttctaagaaaagtctacggtatcctttgtctacaatttcttttaacaacggcaacaactgcagtatttttatactttgactgcatgcggacatttatacaagggagtcctgttctaatattggcatcaatgttcggatctataggcttgattttcgcattgactttacacagacataaacatcccctgaatctgtacctgctttgtggatttacactgtcggaatctctaacgctggcctctgttgttactttctatgatgtgcatgtcgttatgcaagctttcatgctgactactgcagcgtttcttgctctgactacatatactctacaatcaaagagagatttcagtaaacttggagcaggattgtttgctgctttgtggattttaattttgtcaggactcttggggatatttgtgcaaaatgagacagtggagctggtcctgtctgcttttggggcccttgtattctgtggattcattatctatgacacgcactcactaatacataagctctcgcctgaagagtatgtgttagcctctatcaatctctacttggatatcatcaatctgttcttgcatctgttgcagcttttggaagtatctaataagaaataaagtttaaaatagaattaataaaaacatataggtcattttttaaacatggattggaaaccaaggtagttagttaatacacacaagatatatttttttcacatcatccacccatgggtaacaccaaggttgttagttaataatatacaagatattttttctcactctgatccatgtaaaccaaggacgagataagacactctcattcctcatccacaacccattaaaaaaatggaaattaaagccctctattagcataaacggctacaggtctaccatcaggttaaccttcgtctaccttcacaatggcctttccttgtgcccagttcagaccctgtcattgccacgctactaaggactccctgaataccgtggccgacgtcagacattgtctgactgaatacatcctgtgggtttctcatagatggacccatagagaaagcgctcatctgttctccgtgtggtctcggaacatattctcacaccgtctcttccgcagataaatgcgaacccgtacccagaaatacctttaactatatcgatgtggaaattaatctgtatcccgtcaacgacacatcgtgtactcggacgaccactaccggtctcagcgaatccatctcaacgtcggaactaactattactatgaatcataaagactgtaatcccgtctttcgtgatggatacttctccgttcttaataaggtagcgacttcaggtttctttacaggagaaaggtgtgcactctgaatttcgagattaaatgcaataacaaagattcttcctccaaacagttaacgaaagcaaagaatgatactatcatgccgcattcggagacagtaactctagtgggcgacatctatatactatatagtaataccaatactcaagactacgaaactgatacaatctcttatcatgtgggtaatgttctcgatgtcgatagccatatgcccggtagttgcgatatacataaactgatcactaattccaaacccacccactttttatagtaagtttttcacccataaataataaatacaataattaatttctcgtaaaagtagaaaatatattctaatttattgcacggtaaggaagtagaatcataaagaacagtactcaatcaatagcaattatgaaacaatatatcgtcctggcatgcatgtgcctggcggcagctgctatgcctgccagtcttcagcaatcatcctcatcctcctcctcgtgtacggaagaagaaaacaaacatcatatgggaatcgatgttattatcaaagtcacaaagcaagaccaaacaccgaccaatgataagatttgccaatccgtaacggaaattacagagtccgagtcagatccagatcccgaggtggaatcagaagatgattccacatcagtcgaggatgtagatcctcctaccacttattactccatcatcggtggaggtctgagaatgaactttggattcaccaaatgtcctcagattaaatccatctcagaatccgctgatggaaacacagtgaatgctagattgtccagcgtgtccccaggacaaggtaaggactcatgaagaagctcttgctatgatcaaagactgtgaggtgtctatcgacatcagatgtagcgaagaagagaaagacagcgacatccagtactcgggtctaacatctctcataagaaagtgagttacgaagatatcatcggttcaacgatcgtcgatacaaaatgtgtcaagaatctagagtttagcgttcgtatcggagacatgtgcaaggaatcatctgaacttgaggtcaaggatggattcaagtatgtcgacggatcggcatctgaaggtgcaaccgatgatacttcactcatcgattcaacaaaactcaaagcgtgtgtctgaatcgataactctattcatctgaaattggatgagtagggttaatcgaacgattcaggcacaccacgaattaaaaaagtgtaccggacactatattccggtttgcaaaacaaaaatgttcttaactacattcacaaaaagttacctctcgcgacttcttctttttctgtctcaatagtgtgatacgattatgacactattcctattcctattcctatttcctttcagagtatcacaaaaatattaaacctctttctgatggtctcataaaaaaagttttacaaaaatatttttattctctttctctctttgatggtctcataaaaaaagttttacaaaaatatttttattctctttctctctttgatggtctcataaaaaaagttttacaaaaatatttttattctctttctctctttgatggtctcataaaaaaagttttacaaaaatatttttattctctttctctctttgatggtctcataaaaaaagttttacaaaaatatttttattctctttctctctttgatggtctcataaaaaaagttttacaaaaatatttttattctctttctctctttgatggtctcataaaaaaagttttacaaaaatatttttattctctttctctctttgatggtctcataaaaaaagttttacaaaaatatttttattctctttctctctttgatggtctcataaaaaaagttttacaaaaatatttttattctctttctctctttgatggtctcataaaaaaagttttacaaaaatatttttattctctttctctctttgatggtctcataaaaaaa

SEQ ID NO: 37 - DNA, 193964 bp, Artificial Sequence
  LIVP 2.1.1
gagatagttagtctagatatttttcttagtacaaaagtcaatgttttaaaatatatggacaagaatttgtctgtataaaaacttgtgtgaaattttgtaccaaagaaaaaatgtgagcagtatcccctacatggattttactagatcatttatataccaaaaaatattatacgatctacgttttattatatgattttaacgtgtaaattataaacattattttatgatatacaattgtctggtaacctagatgggcataggggatgttgataagctcgacgagtatatgttgttggacgttattgtttaagaaatagttgatgcatcagaaagagaataaaaaatattttagtgagaccatcgaagagagaaagagataaaacttttttacgactccatcagaaagaggtttaatatttttgtgagaccatcgaagagagaaagagaataaaaatattttatgactccattgaagagagaaaaagaaaatgagaatgagaataaaaatattttagtgacaccatcagaaagaggtttaatatttttgtgagaccatcgaagagagaaagagaataaaaatattttatgactccattgaagagagaaagagaaaatgagaatgagaataaaaatattttagtgacaccatcagaaagaggtttaatattttttatgagaccatcaaagagagaaagaaaataaaaatatttttgtaaaactttttttatgagaccatcaaagagagaaagagaataaaaatatttttgtaaaactttttttatgagaccatcaaagagagaaagagaataaaaatatttttgtaaaactttttttatgagaccatcaaagagagaaagagaataaaaatatttttgtaaaactttttttatgagaccatcaaagagagaaagagaataaaaatatttttgtaaaactttttttatgagaccatcaaagagagaaagagaataaaaatatttttgtaaaactttttttatgagaccatcaaagagagaaagagaataaaaatatttttgtaaaactttttttatgagaccatcaaagagagaaagagaataaaaatatttttgtaaaactttttttatgagaccatcaaagagagaaagagaataaaaatatttttgtaaaactttttttatgagaccatcaaagagagaaagagaataaaaatatttttgtaaaactttttttatgagaccatcaaagagagaaagagaataaaaatatttttgtaaaactttttttatgagaccatcagaaagaggtttaatatttttgtgatactctgaaaggaaataggaataggaataggaatagtgtcataatcgtatcacactattgagacagaaaaagaagaagtcgcgagaggtaactttttgtgaatgtagttaagaacatttttgttttgcaaaccggaatatagtgtccggtacacttttttaattcgtggtgtgtctgaatcgttcgattaaccctactcatccaatttcagatgaatagagttatcgattcagacacacgctttgagttttgttgaatcgatgagtgaagtatcatcggttgcaccttcagatgccgatccgtcgacatacttgaatccatccttgacctcaagttcagatgattccttgcacatgtctccgatacgaacgctaaactctagattcttgacgcattttgtatcgacgatcgttgaaccgatgatatcttcgtaactcactttcttatgagagatgttagacccgagtactggatgggtcttgatgtcgctgtctttctcttcttcgctacatctgatgtcgatagacacttcacagtctttgatcatagcaagagcttcttcatgagtgatcgcgggagagtccttaccttgtcctggggacacgctggacaatctagcattcactgtgtttccatcagcggattctgagatggatttaatctgaggacatttggtgaatccaaagttcattctcagacctccaccgatgatggagtaataagtggtaggaggatctacatcctcgactgatgtggaatcatcttctgattccacctcgggatctggatctgactcggactctgtaatttccgttacggattggcaaatcttatcattggtcggtgtttggtcttgctttgtgactttgataataacatcgattcccatatgatgtttgttttcttcttccgtacacgaggaggaggatgaggatgattgctgaagactggcaggcatagcagctgccgccaggcacatgcatgccaggacgatatattgtttcataattgctattgattgagtactgttctttatgattctacttccttaccgtgcaataaattagaatatattttctacttttacgagaaattaattattgtatttattatttatgggtgaaaaacttactataaaaagtgggtgggtttggaattagtgatcagtttatgtatatcgcaactaccgggcatatggctatcgacatcgagaacattacccacatgataagagattgtatcagtttcgtagtcttgagtattggtattactatatagtatatagatgtcgcccactagagttactgtctccgaatgcggcatgatagtatcattctttgctttcgttaactgtttggaggaagaatctttgttattgcatttaatctcgaaattcagagtgcacacctttctcctgtaaagaaacctgaagtcgctaccttattaagaacggagaagtatccatcacgaaagacgggattacagtctttatgattcatagtaatagttagttccgacgttgagatggattcgctgagaccggtagtggtcgtccgagtacacgacgtgtcgttgacgggatacaggttaatttccacatcgatatagttaaaggtattactgggtacgggttcgcatttatctgcggaagagacggtgtgagaatatgttccgagaccacacggagaacagatgacgtctccggatactccgtatcctattctacattttgtttgggaaacacatgccttgcatccggatgatcctttgagaagacaataatatccgggagagcattcacagattctattgtgagtcgtgttacacgatcgcgtcttccgttacaacttagacaagcgggtaaatgattattgcgagatgtgaaggtacccgaaccacacggcgtacattgtgtgttagtcttgctatcgcataatctggaagcgtatgttcccggacacaaattatggcgtttgtattcgttgtctttacactttccatcggatggtgcatgcggtgctatatctcttccgtttattattatacatgagagaaacaatatatacgagtataatacggacttcatgatttaataatgtagtaatcgtcgtcttgttcctgtttcctacttctccaatcatatagatattttctttctatcatggataatatttgtaatggttctttccgtacaacatactgtttagatgatattgcgcataatttccggaggcaaatacgatagtctagattgaccgatggtagactctaatttattgagtgctttgtcgacgagtttacttttacgctccatcgatagatggcactgttctatgagatcgtcgtacatgggaaatgaaatgtgactgtctgaatgtatggctttaagatagctgtgataccgtatacaggtcggtgtcggagattcgaatctctttaaggcgacttatgtcacgatgatggaatctatcttatcgaatgatatatttttcataaatacacttttatagtcctcgtttaaacagaatttactatgtagttccgcgaatgactcgtcccttaataggcagtaggctagtatcttttttacgtagtaatcgtcgtagggagagacatcttgtagaacaacgatttaatcataggtagagatactttcagtctgtggtggatgatgtcattcacaacatccgccttgtatatgatgtttctgttttcaaacaccaagtcgaataccgtctttagtcggaaggttgatgtcgtatccgatgtatgaggcaacattgttgttacaattttgaaaggcggtattatagtattcgtctttctgaatgtcgaacctatctaatagataccgtagtatattgagagtgtatccttgattatgttttatgaatagataaagtagatgttgtccttcttccttttgttcgtgccaattgagtaacattatgagaatatgacctgttgcacaatcgttccatgatgggtgtacaatcaagattattacgtatcctcgtatcggctcctcgagataaaagagcatacaccacacgaggactatgtttggtatactgttgaaggtaagtgtgtaaccgcgttaatgtttgctccataatctattatcgcgtagatgaatcgcttctcggctcgcatcttagtgtgacttaacttgtaataattgctttcgtagaacgtggatatgtgtttacagtagtaatgaagagaagtgagttcatcctcgtcggcgcaattagggtcggatcctttgtacagaacgtaatagtttaagctcccattgaatttatatctaagataacacagcaatagatcggatgatttactaaagtcatcaatggtgtccgttagtatatcaaagatcttgttatcgattgatagtggtcatccttgctatcaaagttacgcatgccgtggtgtaacaatatctttaatacagatggattaaatcgtgtattcatcgtatagcaatgtaatggagagttacctcgtttattcagatcgcagtgtttaataactagcttaaacagatgagacgatgtatccacatcaaagaacgtaaaatacatatgacagacattgttgacagaaacgtgaccttcattcttaccgtcgtccataaatacgttaggtatgtaccacatactgtcgcgaacgatgcgtacaatctcgtccatctcataatgatttactttttcataattaaagatgtgaaagaaaaccgaacaatatatttttttagtaatgtttatgcgagacatataaaataaactccgtgtttatgatgccggtaaatgtttttatcatcttggacggaatcgattttgtaatatgtcatggaaacaaatgaaacaggacattatcgctccatgataaattatttaatggagtaataaagtatctccatgggtaatttcgaaatcaagttatcgtctgtattaatgttgtccactatggagtcgatcctctcattgttctttacagtttctgtaatgatggacgttagttcttttttgtaccatttgatgtcggattctttgcgtatctcaatttgtggcgtttgcttcgtttaaataatatatcaaacatggagacgcctgatatgtagacattcttcattctattaatgtctactctatagcgctttagttccttatgacgaccggcgatatcatactttactttagaaggaaaatcatcatctaggattaaggcgtatctgatacaggcgaataatggttcaggatatagatagcgtatatctctattaaatgcgtcaatcatagtctctagagtgggatggtaactcagtaataaatcaactagcttcgttttgttttctctttggtaactgcttttctggatggccgtattgattatcgagcgtgacactcgctccatattccaataaccgctttgcaaattgtatattattgacatcgaccgcgtaatatagtagagttatcgatcatatctatatcatccatgtacttgcttagtatatcaaatacatctatcagtatggtttcataacagtgatacccgcaattattaaatctcgataatatcagaccgtacatacatagacggccattgttcgatacgtgatttacagccgcgtgtccatattttccacgataaaccttacgacgtttacatcgacgagattattattaacaaagtagtcgtgcagaggatagttgttgtccgttatctaacatgcatcgaacgaccatatcgccgtaatgtaagtagtttatcaacatggcttgtacatcctgttgtctaaatctctttagaatgttatcgatgatgtagtggttatattctctggaatcgtacgaagtaatactacgcattacgtcgacaagagtatgacgtctctcaataagaagattaacgatttccatgtctacattatatggggttactctaaatcgcttgtttagataatatagggctgacgtcgtatactctacacgtgtccacatcctttattaataataatttaacaatctctatatctatggttgagaaagaccagtagtattggatgggtaaagatcctccttcgtctctgccatggatggaaacattgttatcgatcaaacatttaattacatccttggatagagattgagattctctatgagacgatatatagtaatgaagagagttcttacacatatcactgtcgtacatacaggtacgaaatacgtaaccggtgctgtaacattctgatttaagaagccatagcaatacttctggtctcggattaggcgtcgttacgtatatatccaccaatccgagaccattgattgcataattcgtattcttggacggacgtatccgtttatccacaattaggtattttagcagacgtaagtcgatattatccgaatacagatcgaaatcatttatattcgacttgagttcgttagaggaatttgaatagctggatatcagtagatgcacaatctgagatttgacgtatctatgcttactgtatactcctagcggagttaatccttcgttgtttctacaaagtctctcgactccgcgagagaacaatcttaatgtctgtatcgcatttattggagacgtaacaatgtagcgcattgtttcctcgtctatctatatgttttgataagttgtgacacgtttcaatttctagttttatttttttgtacgtcacatcttcatccagtagacgacatagaatagtgcactctctaccacaataatccatagctattctggtgctaattattcctatttcacgaaggcaatcattcctcataagatgataaaaagtgtagtggagatttagtatttagcagtgcggatatgatccaagagggtgagatagtcgttctcgttcagaatctttcgcagcataagtagtatgtcgatatacttatcgttgaagactctttataaaagtctatttgtttatatttattgcggatagcagtatttccctataaaaagtatacgtcctgtggtgtctttaatcatgtacatgaatggatggtttatgtagaccttcgtacgatataccatcgaaaagttaatcgtaaatactcctgtaacggccgatgcttctgtatactcctcattaacatctataaacgtcgtatgtagaaatttttctacagtgatagtttcattacacatcttgctaaaatctgcataatatccgaatatattagtaagtcctaaattttctaaaatcggtaccagattatacggttctgtcatttccactttaaactttggcatatacaagtctatacttttagtagataacataccacaccattttttaaatttttcatctgttatatttttttctatgttatatataccttctatgtcgtccggtagtataattaccatactagagtttccctcgtatggaatatcgataatagagaatcctccgaataattcattaatatgtacatattgcaagttattctcggtacccaccatcatatcaacgctggtaactatattcttagaaatataaaacttgtctgtatatgtaagatgtttagaaaatggatatttccacattgctttaaaatggacggcgctaacaactgtcatacgagtattaatggatagcggactagtcaataaggaattaattttaccatttgtcattgtcttaacccattcgttgattagttcctttgtttggttagcattattaaagtttacagtttgaaaatcgtcttttattttttgtaggaaggaggcgtggaactcgatactatcgctaccgtatattttatttgcggtagctagtgtcgcacaatacggaatatctacctccatgtcatcattattgtcatcgggtgtattctcattcatattctctatatattttgatagttgttcagctgtagaaccagctgctccatgatttagaatagataaagtagataaaatggaaactggagaaatcaaaacattttcatcagggtgttttaagattagttctttaaagatatccatggtatagacctaacgataacgatatatatcataaataaataatgttaaatttcaatttatgtttgtaccccgtattcatacttaacaaattggtattgcgtacacaatcaatcatattacataccattaataatgcaagcataaaaaattgttagtagatgtttctaaatataggttccgtaagcaaagaatataagaatgaagcggtaatgataaaatcaatcgttatctaaaatgatcatactcatttattttattctattatattaacacatacatttttaacagcaacacattcaatattgtattgttatttttatattatttacacaattaacaatatattattagtttatattactgaattaataatataaaattcccaatcttgtcataaacacacactgagaaacagcataaacacagaatccatcaaaaatgttgataaattatctgatgttgttgttcgctgctatgataatcagatcattcgccgatagtggtaacgctatcgaaacgacattgccagaaattacaaacgctacaacagatattccagctatcagattatgcggtccagagggagatggatattgtttacacggtgactgtatccacgctagagatattgacggtatgtattgtagatgctctcatggttatacaggcattagatgtcagcatgtagtattagtagactatcaacgttcagaaaacccaaacactacaacgtcatatatcccatctcccggtattatgcttgtattagtaggcattattatgtgttgtctattatctgtttataggttcactcgacgaactaaactacctatacaagatatggttgtgccataatttttataaattttttttatgagtatttttacaaaaatgtataaagtgtatgtcttatgtatatttataaaaatgctaagtatgcgatgtatctatgttatttgtatttatctaaacaatacctctacctctagatattatacaaaaattttttatttcggcatattaaagtaaaatctagttaccttgaaaatgaatacagtgggtggttccgtatcaccagtaagaacataatagtcaaatacagtatccgattgagattttgcatacaatactagtctagaaagaaatttgtaatcatcttctgtgacgggagtccatatatctgtatcatcgtctagtttatcagtgtcccatgctatattcctgttatcatcattagttaatgaaaataactctcgtgcttcagaaaagtcaaatattgtatccatacatacatctccaaaactatcgcttatacgtttatctttaacgatacctatacctagatggttatttactaacagacattttccagatctattgactataactcctatagtttccacatcaaccaagtaatgatcatctattgttatataacaataacataactcttttccatttttatcagtatgtatatctatatcaacgtcgtcgttgtagtgaatagtagtcattgatctattatatgaaacggatatgtctagaacggcaattgttttacgtccagttaacactttcgttgatttaaagtctagagtctttgcaaacataatatccttatccgactttatatttcctgtagggtggtataattttattttgcctccacatatcggtgtttccaaatatattactagacaatattccatatagttattagttaagggtacccaattagaacacgtacgcttattatcatcatttggatcgtatttcataaaagttattgtgttatcgatgtcaacacattctacattttttaatcgtctatatagtatttttctgatattttctataatatcagaattgtcttccatcggaagttgtatactatcggaatcagttacatgtttaaataattctctgatgtcattccttatacaatcaaattcattattaaacagtttaatagtctgtagacctttatcgtcgtaaatatccattgtcttattagttacgcttatttttatgtgttttacgttgctttattatattttataagaatgattgtttgacgaatcacgagaactattaagacacattattaggtatatattataaaaaagtttttgattacgatgttataagaggaaagaggacacattaacatcatacatcaattaactacattcttataacatcgtaatcaaaagaattgcaattttgatgtataacaactgtcaatgggttatggaattgtatattacatattatacggtatgttggtaacgacaaataccggtcggtaattgtctgccggtgtaatagaattatatatatctatctattacaccggccttgtatacataataataagttgtggtagtatgatctccatatttataatttaggactttgtattcagtatttttggaatcataaaaaataaaaaaaagttttactaatttaaaatttaaaaagtatttacatttttttcactgtttagtcgcggatatggaattcgatcctgccaaaatcaatacatcatctatagatcatgtaacaatattacaatacatagatgaaccaaatgatataagactaacagtatgcattatccgaaatattatatcaatatcacaaaaataaatacacatttggctaatcaatttcgggcttggaaaaaacgtatcgccggaagggactatatgactaacttatctagagatacaggaatacaacaatcaaaacttactgaaactatacgtaactgtcaaaaaaatagaaacatatatggtctatatatacactacaatttagttattaattggataaccgatgtgattatcaatcaatattaagagggttggtaaattggtacatagctaataatacctatactccaaatacacccaataatacaacaaccatttctgagttggatatcatcaaaatactggataaatacgaggacgtgtatagagtaagtaaagaaaaagaatgtggaatttgctatgaagttgtttactcaaaacgatagatactttggtttattggattcgtgtactcatatattttgcataacatgcatcaatatatggcataaaacacgaagagaaaccggtgcgtcggataattgtcctatatgccgtacccgttttagaaacataacaatgagcaagttctataagctagttaactaataaataaaaagtttaatttgttgacgacgtatgtcgttattttttctcgtataaaagattaatttgattctaatataatctttagtattggataaatatcaattcaaattaattccattagattatatcataaataaaaatagtagcacgcactacttcagccaaatattcttttttgaaacgccatctatcgtagtgaggacacaagtgaacctataattatcaaatttattagtatcagtcacatgaaggactttacgtagagtgacgattccactatctgtggtacgaacggtttcatcttctttgatgccatcacccagatgttctataaacttggtatcctcgtccgatctcatatcctttgccaaccaatacatgtagctaaaattaggcataaatttcacacatcctgaacaatgaaattctccagaagatgttacaatgtctagatttggacatttggtttcaaccgcgttaacatatgagtgaacacacccatacatgaaagcgatgagaaataggattctcatcttgccaaaatatcactagaaaaaatttatttatcaattttaaaggtataaaaaatacttattgttgctcgaatattttgtatttgatggtatacggaagattagaaatgtaggtattatcatcaactgattctatggttttatgtattctatcatgtttcactattgcgttggaaataatatcatatgcttccacatatattttattttgttttaactcataatactcacgtaattctggattattggcatatctatgaataattttagctccatgatcagtaaatattaatgagaacatagtattaccacctaccattatttttttcatctcattcaattcttaattgcaaagatctatataatcattatagcgttgacttatggactctggaatcttagacgatgtacagtcatctataatcatggcatatttaatacattgttttatagcatagtcgttatctacgatgttagatatttctctcaatgaatcaatcacacaatctaatgtaggtttatgacataatagcattttcagcagttcaatgtttttagattcgttgatggcaatggctatacatgtatatccgttatttgatctaatgttgacatctgaaccggattctagcagtaaagatactagagattgtttattatatctaacagccttgtgaagaagtgtttctcctcgtttgtcaatcatgttaatgtctttaagataaggtaggcaaatgtttatagtactaagaattgggcaagcataagacatgtcacaaagaccctttttgtatgtataagtgtagaaattataacatccatagttggatttacataggtgtccaatcgggatctctccatcatcgagataattgatggcatctcccttccttttttagtagatatttcatcgtgtaagaatcaatattaatatttctaaagtatccgtgtatagcctctttatttaccacagttccatattccactagagggatatcgccgaatgtcatatactcaattagtatatgttggaggacatccgagttcattgttttcaatatcaaagagatggtttccttatcatttctccatagtggtacaatactacacattatttcgtgcggctttccattttccaaaaacaatttgaccaaatctacatctttattgtatctataatcactatttagataatcagccataattcctcgagtgcaacatgttagatcgtctatatatgaataagccgtgttatctattcctttcattaacaatttaacgatgtctatatctatatgagatgacttaatataatattgaagagctgtacaatagtttttatctataaaagacggcttgattccgtgattaattagacatttaacaacttccggacgcacatatgctctcgtatccgactctgaatacagatgagagatgatatacagatgcaatacggtaccgcaatttcgtagttgataatcatcatacgcgtatcagtactcgtcctcataaagaacactgcagccattttctatgaacaaatcaataatttcaggaacaggatcatctgtcattacataattttctataactgaacgatggttttcacatttaacactcaagtcaaatccatgttctaccaacacctttatcaagtcaacgtctacatttttggatttcatatagctgaatatattaaagttatttatgttgctaaatccagtggcttctagtagagccatcgctatatccttattaactttaacatgtctactatttgtgtattcttctaatggggtaagctgtctccaatttttgcgtaatggattagtgccactgtctagtagtagtttgacgacctcgacattattacaatgctcattaaaaaggtatgcgtgtaaagcattattcttgaattggttcctggtatcattaggatctctgtctctcaacatctgtttaagttcatcgagagccacctcctcattttccaaatagtcaaacattttgactgaatgagctactgtgaactctatacacccacacaactaatgtcattaaatatcatgtcaaaaacttgtacaattattaataaaaataatttagtgtttaaattttaccagttccagattttacacctccgttaatacctccattaaccccactggacgatcctcctccccacattccaccgccaccagatgtataagttttagatcctttattactaccatcatgtccatggataaagacactccacatgccgccactaccccctttagaagacatattaataagacttaaggacaagtttaacaataaaattaatcacgagtaccctactaccaacctacactattatatgattatagtttctatttttacagtaccttgactaaagtttctagtcacaagagcaatactaccaacctacactattatatgattatagtttctatttttataggaacgcgtacgagaaaatcaaatgtctaatttctaacggtagtgttgataaacgattatcgtcaatggatacctcctctatcatgtcgtctattttcttactttgttctattaacttattagcattatatattatttgattataaaacttatattgcttattagcccaatctgtaaatatcggattattaacatatcgtttctttgtaggtttatttaacttgtacatcactgtaagcatgtccttaccatttattttaatttgacgcatatccgcaatttctttttcgcagtcggttataaattctatatatgatggatacatgctacatgtgtacttataatcgactaatatgaagtacttgatacatatttccagtaacgatttattattaccacctatgaataagtacctgtgatcgtctaggtaatcaactgttttcttaatacattcgatggttggtaatttactcagaataatttccaatatcttaatatataattctgctatttctgggatatatttatctgccagtataacacaaatagtaatacatgtaaacccatattttgttattatattaatgtctgcgccattatctattaaccattctactaggctgacactatgcgactcaatacaatgataaagtatactacatccatgtttatctattttgtttatatcattaatatacggcttacaaagttttagtatcgataacacatccaactcacgcatagagaaggtagggaataatggcataatatttattaggttatcatcattgtcattatctacaactaagtttccattttttaaaatatactcgacaactttaggatctctattgccaaatttttgaaaatatttatttatatgcttaaatctatataatgtagctccttcatcaatcatacatttaataacattgatgtatactgtatgataagatacatattctaacaatagatcttgtatagaatctgtatatcttttaagaattgtggatattaggatattattacgtaaactattacacaattctaaaatataaaacgtatcacggtcgaataatagttgatcaactatataattatcgattttgtgatttttcttcctaaactgtttacgtaaatagttagatagaatattcattagttcatgaccactatagttactatcgaataacgcgtcaaatatttcccgtttaatatcgcatttgtcaagataataatagagtgtggtatgttcacgataagtataataacgcatctctttttcgtgtgaaattaaatagtttattacgtccaaagatgtagcataaccatcttgtgacctagtaataatataataatagagaactgttttacccattctatcatcataatcagtggtgtagtcgtaatcgtaatcgtctaattcatcatcccaattataatattcaccagcacgtctaatctgttctattttgatcttgtatccatactgtatgttgctacatgtaggtattcctttatccaataatagtttaaacacatctacattgggatttgatgttgtagcgtatttttctacaatattaataccatttttgatactatttatttctatacctttcgaaattagtaatttcaataagtctatatcgatgttatcagaacatagatattcgaatatatcaaaatcattgatatttttatagtcgactgacgacaataacaaaatcacgacatcgtttttgatattattatttttcttggtaacgtatgcctttaatggagtttcaccatcatactcatataatggatttgcaccactttctatcaatgattgtgcactgctggcatcgatgttaaatgttttacaactatcatagagtatcttatcgttaaccatgattggttgttgatgctatcgcattttttggtttctttcatttcagttatgtatggatttagcacgtttgggaagcatgagctcatatgatttcagtactgtagtgtcagtactattagtttcaataagatcaatctctagatctatagaatcaaaacacgataggtcagaagataatgaatatctgtaggcttcttgttgtactgtaacttctggttttgttagatggttgcatcgtgctttaacgtcaatggtacaaattttatcctcgctttgtgtatcatattcgtccctactataaaattgtatattcagattatcatgcgatgtgtatacgctaacggtatcaataaacggagcacaccatttagtcataaccgtaatccaaaaatttttaaagtatatcttaacgaaagaagttgtgtcattgtctacggtgtatggtactagatcctcataagtgtatatatctagagtaatgtttaatttattaaatggttgataatatggatcctcgtgacaatttccgaagatggaaataagacataaacacgcaataaatctaattgcggacatggttactccttaaaaaaatacgaataatcaccttggctatttagtaagtgtcatttaacactatactcatattaatccatggactcataatctctatacgggattaacggatgttctatatacggggatgagtagttctcttctttaactttatactttttactaatcatatttagactgatgtatgggtaatagtgtttgaagagctcgttctcatcatcagaataaatcaatatctctgtttttttgttatacagatgtattacagcctcatatattacgtaatagaacgtgtcatctaccttattaactttcaccgcatagttgtttgcaaatacggttaatcctttgacctcgtcgatttccgaccaatctgggcgtataatgaatctaaactttaattgcttgtaatcattcgaaataatttttagtttgcatccgtagttatcccctttatgtaactgtaaatttctcaacgcgatatctccattaataatgatgtcgaattcgtgctgtatacccatactgaatggatgaacgaataccgacggcgttaatagtaatttactttttcatctttacatattgggtactagttttactatcataagtttataaattccacaagctactatggaataagccaaccatcttagtataacacacatgtcttaaagtttattaattaattacatgttgttttatatatcgctacgaatttaaacagagaaatcagtttaggaaaaaaaattatctatctacatcatcacgtctctgtattctacgatagagtgctactttaagatgcgacagatctgtgtcatcaaatatatactccattaaaatgattattccggcagcgaacttgatattggatatatcacaacctttgttaatatctacgacaatagacagcagtcccatggttccataaacagtgagtttatctttctttgaagagatattttgtagagatcttataaaactgtcgaatgacatcgcatttatatttttagctaaatcgtatatgttaccatcgtaatatctaaccgcgtctatcttaaacgtttccatcgctttaaagacgtttccgatagatggtctcatttcatcagtcatactgagccaacaaatataatcgtgtataacatctttgatagaatcagactctaaagaaaacgaatcggctttattatacgcattcatgataaacttaatgaaaaatgtttttcgttgtttaagttggatgaatagtatgtcttaataattgttattatttcattaattaatatttagtaacgagtacactctataaaaacgagaatgacataactaatcataactagttatcaaagtgtctaggacgcgtaattttcatatggtatagatcctgtaagcattgtctgtattctggagctattttctctatcgcattagtgagttcagaatatgttataaatttaaatcgaataacgaacataactttagtaaagtcgtctatattaactcttttattttctagccatcgtaataccatgtttaagatagtatattctctagttactacgatctcatcgttgtctagaatatcacatactgaatctacatccaattttagaaattggtctgtgttacatatctcttctatattattgttgatgtattgtcgtagaaaactattacgtagaccattttctttataaaacgaatatatagtactccaattatctttaccgatatatttgcacacataatccattctctcaatcactacatctttaagattttcgttgttaagatatttggctaaactatataattctattagatcatcaacagaatcagtatatatttttctagatccaaagacgaactctttggcgtcctctataatattcccagaaaagatattttcgtgttttagtttatcgagatctgatctgttcatatacgccatgattgtacggtacgttatgataaccgcataaaataaaaatccattttcatttttaaccaatactattcataattgagattgatgtaatactttgttactttgaacgtaaagacagtacacggatccgtatctccaacaagcacgtagtaatcaaatttggtgttgttaaacttcgcaatattcatcaatttagatagaaacttatactcatcatctgttttaggaatccatgtattattaccactttccaacttatcattatcccaggctatgtttcgtccatcatcgttgcgcagagtgaataattcttttgtattcggtagttcaaatatatgatccatgcatagatcggcaaagctattgtagatgtgatttttcctaaatctaatataaaactcgtttactagcaaacactttcctgatttatcgaccaagacacatatggtttctaaatctatcaagtggtggggatccatagttatgacgcagtaacatatattattacattcttgactgtcgctaatatctaaatatttattgttatcgtattggattctgcatatagatggcttgtatgtcaaagatatagaacacataaccaatttatagtcgcgctttacattctcgaatctaaagttaagagatttagaaaacattatatcctcggatgatgttatcactgtttctggagtaggatatattaaagtctttacagatttcgtccgattcaaataaatcactaaataatatcccacattatcatctgttagagtagtatcattaaatctattatattttatgaaagatatatcactgctcacctctatatttcgtacatttttaaactgtttgtataatatctctctgatacaatcagatatatctattgtgtcggtagacgataccgttacatttgaattaatggtgttccattttacaacttttaacaagttgaccaattcatttctaatagtatcaaactctccatgattaaatattttaatagtatccattttatatcactacggacacaaagtagctgacataaaccattgtataatttttatgttttatgtttattagcgtacacattttggaagttccggcttccatgtatttcctggagagcaagtagatgatgaggaaccagatagtttatatccgtacttgcacttaaagtctacattgtcgttgtatgagtatgatcttttaaacccgctagacaagtatccgtttgatattgtaggatgtggacatttaacaatctgacacgtgggtggatcggaccattctcctcctgaacacaggacactagagttaccaatcaacgaatatccactattgcaactataagttacaacgctcccatcggtataaaaatcctcgtatccgttatgtcttccgttggatatagatggaggggattggcatttaacagattcacaaataggtgcctcgggattccataccatagatccagtagatcctaattcacaatacgatttagattcaccgatcaactgatatccgctattacaagagtacgttatactagagccaaagtctactccaccaatatcaagttggccattatcgatatctcgaggcgatgggcatctccgtttaatacattgattaaagagtgtccatccagtacctgtacatttagcatatataggtcccattttttgctttctgtatccaggtagacatagatattctatagtgtctcctatgttgtaattagcattagcatcagtctccacactattcttaaatttcatattaatgggtcgtgacggaatagtacagcatgatagaacgcatcctattcccaacaatgtcaggaacgtcacgctctccaccttcatatttatttatccgtaaaaatgttatcctggacatcgtacaaataataaaaagcccatatatgttcgctattgtagaaattgtttttcacagttgctcaaaaacgatggcagtgacttatgagttacgttacactttggagtctcatctttagtaaacatatcataatattcgatattacgagttgacatatcgaacaaattccaagtatttgattttggataatattcgtattttgcatctgctataattaagatataatcaccgcaagaacacacgaacatctttcctacatggttaaagtacatgtacaattctatccatttgtcttccttaactatatatttgtatagataattacgagtctcgtgagtaattccagtaattacatagatgtcgccgtcgtactctacagcataaactatactatgatgtctaggcatgggagacttttttatccaacgatttttagtgaaacattccacatcgtttaatactacatatttctcatacgtggtataaactccacccattacatatatatcatcgtttacgaataccgacgcgcctgaatatctaggagtaattaagtttggaagtcttatccatttcgaagtgccgtgtttcaaatattctgccacacccgttgaaatagaaaattctaatcctcctattacatataactttccatcgttaacacaagtactaacttctgattttaacgacgacatattagtaaccgttttccattttttcgtttcaagatctacccgcgatacggaataaacatgtctattgttaatcatgccgccaataatgtatagacaattatgtaaaacatttgcattatagaattgtctatctgtattaccgactatcgtccaatattctgttctaggagagtaatgggttattgtggatatataatcagagtttttaatgactactatattatgttttataccatttcgtgtcactggctttgtagatttggatatagttaatcccaacaatgatatagcattgcgcatagtattagtcataaacttgggatgtaaaatgttgatgatatctacatcgtttggatttttatgtatccactttaataatatcatagctgtaacatcctcatgatttacgttaacgtcttcgtgggataagatagttgtcagttcatcctttgataattttccaaattctggatcggatgtcaccgcagtaatattgttgattatttctgacatcgacgcattatatagttttttaattccatatcttttagaaaagttaaacatccttatacaatttgtgaaattaatattatgaatcatagtttttacacatagatctactacaggcggaacatcaattattatggcagcaactagtatcatttctacattgtttatggtgatgtttatcttcttccagcgcatatagtctaatagcgattcaaacgcgtgatagtttataccattcaatataatcgcttcatcctttagatggtgatcctgaatgcgtttaaaaaaattatacggagacgccgtaataatttccttattcacttgtataatttccccattgatagaaaatattacgctttccattcttaaagtactataagtaattatagtataatgtaaacgtttatatattcaatatttttataaaaatcattttgacattaattcctttttaaatttccgtctatcatctatagaaacgtattctatgaatttataaaatgcttttacgtgtcctatcgtaggcgatagaaccgctaaaaagcctatcgaatttctacaaaagaatctgttatatggtatagggagagtataaaacattaaatgtccgtacttattaaagtattcagtagccaatcctaactctttcgaatacttattaatggctcttgttctgtacgaatctatttttttgaacaacggacctagtggtatatcttgttctatgtatctaaaataatgtctgactagatccgttagtttaatatccgcagtcatcttgtctagaatggcaaatctaactgcgggtttaggctttagtttagtttctatatctacatctatgtctttatctaacaccaaaaatataatagctaatattttattacaatcatccggatattcttctacgatctcactaactaatgtttctttggttatactagtatagtcactatcggacaaataaagaaaatcagatgatcgatgaataatacatttaaattcatcatctgtaagatttttgagatgtctcattagaatattattagggttagtactcattatcattcggcagctattacttattttattatttttcaccatatagatcaatcattagatcatcaaaatatgtttcaatcatcctaaagagtatggtgaatgactcttcccatctaatttctgaacgttcaccaatgtctctagccactttggcactaatagcgatcattcgcttagcgtcttctatattattaactggttgattcaatctatctagcaatggaccgtcggacagcgtcattctcatgttcttaatcaatgtacatacatcgccgtcatctaccaattcatccaacaacataagctttttaaaatcatcattataataggtttgatcgttgtcatttctccaaagaatatatctaataagtagagtcctcatgattagttaacaactattttttatgttaaatcaattagtacaccgctatgtttaatacttattcatattttagtttttaggattgagaatcaatacaaaaattaatgcatcattaattttagaaatacttagtttccacgtagtcaatgaaacatttgaactcatcgtacaggacgttctcgtacaggacgtaactataaaccggtttatatttgttcaagatagatacaaatccgataactttttttacgaattctacgggatccactttaaaagtgtcataccgggttctttttatttttttaaacagatcaatggtgtgatgttgattaggtcttttacgaatttgatatagaatagcgtttacatatcctccataatggtcaatcgccatttgttcgtatgtcataaattctttaattatatgacactgtgtattatttagttcatccttgttcattgttaggaatctatccaaaatggcaattatactagaactataggtgcgttgtatacacatattgatgtgtctgtttatacaatcaatgctactaccttcgggtaaaattgtagcatcatataccatttctagtactttaggttcattattatccattgcagaggacgtcatgatcgaatcataaaaaaatatattatttttatgttattttgttaaaaataatcatcgaatacttcgtaagatactccttcatgaacataatcagttacaaaacgtttatatgaagtaaagtatctacgatttttacaaaagtccggatgcataagtacaaagtacgcgataaacggaataataatagatttatctagtctatctttttctatagctttcatagttagatacatggtctcagaagtaggattatgtaacatcagcttcgataaaatgactgggttatttagtcttacacattcgctcatacatgtatgaccgttaactacagagtctacactaaaatgattgaacaatagatagtctaccattgtttcgtattcagatagtacagcgtagtacatggcatcttcacaaattatatcattgtctaatagatatttgacgcatcttatggatcccacttcaacagccatcttaaaatcggtagaatcatattgctttcctttatcattaataatttctagaacatcatctctatcataaaagatacaaatattaactgtttgatccgtaataacattgctagtcgatagcaatttgttaataagatgcgctgggctcaatgtcttaataagaagtgtaagaggactatctccgaatttgttttgtttattaacatccgttgatggaagtaaaagatctataatgtctacattcttgactgttttagagcatacaatatggagaggtgtatttccatcatgatctggttttgagggactaattcctagtttcatcatccatgagattgtagaagcttttggattgtctgacataagatgtctatgaatatgatttttgccaaatttatccactatcctggcttcgaatccgatggacattatttttttaaacactctttctgaaggatctgtacacgccaacaacggaccacatccttcttcatcaaccgagttgttaatcttggctccatactgtaccaataaatttattctctctatgacttcatcatctgttcccgagagataatatagaggcgttttatgctgtttatcacacgcgtttggatctgcgccgtgcgtcagcagcatcgcgactattctattattattaattttagaagctatatgcaatggataatttccatcatcatccgtctcatttggagagtatcctctatgaagaagttcttcgacaaatcgttcatctagtcctttaattccacaatacgcatgtagaatgtgataattatttccagaaggttcgatagcttgtagcatattcctaaatacatctaaatttttactattatatttggcataaagagatagataatactcggccgacataatgttgtccattgtagtataaaaattaatatttctatttctgtatatttgcaacaatttactctctataacaaatatcataacttagttcttttatgtcaagaaggcactggtttagttcatctataaatgtcacgccataactaccacgcatgccatactcagaattatgataaagatatttatccttggggtgtaggtaatggggattaatctttgttggatcagtctctaagttaacacatgtcacacatgatccatttatagttatatcacacgatgatgatttatgaattgattccggaagatcgctatcgtattttgtggttccacaattcatttccatacatgttattgtcacactaatattatgatgaactttatctagccgctgagtggtaaacaacagaacagatagtttattatctttaccaacaccctcagccgctgccacaaatctctgatccgtatccatgatggtcatgtttatttctagtccgtatccagtcaacactatgttagcatttctgtcgatatagctttcactcatatgacactcaccaataatagtagaattaatgtcgtaatttacaccaatagtgagttcggcggcaaagtaccaataccggtaatcttgtcgaggaggacatatagtattcttgtattctaccgaatacccgagagatgcgatacaaaagagcaagactaatttgtaaaccatcttactcaaaatatgtaacaatagtacgatgcaatgagtaagacaataggaaatctatcttatatacacataattattctatcaattttaccaattagttagtgtaatgttaacaaaaatgtgggagaatctaattagtttttctttacacaattgacgtacatgagtctgagttccttgtttttgctaattatttcatccaatttattattcttgacgatatcgagatcttttgtataggagtcaaacttgtattcaacatgcttttctataatcattttagctatttcggcatcatccaatagtacattttccagattagcagaatagatattaatgtcgtatttgaacagagcctgtaacatctcaatgtctttattatctatagccaatttaatgtccggaatgaagagaagggaattattggtgtttgtcgacgtcatatagtcgagcaagagaatcatcatatccacgtgtccattttttatagtgatgtgaatacaactaaggagaatagccagatcaaaagtagatggtatctctgaaagaaagtaggaaacaatacttacatcattaagcatgacggcatgataaaatgaagttttccatccagttttcccatagaacatcagtctccaatttttcttaacaaacagttttaccgtttgcatgttaccactatcaaccgcataatacaatgcggtgtttcccttgtcatcaaattgtgaatcatccagtccactgaatagcaaaatctttactattttggtatcttccaatgtggctgcctgatgtaatggaaattcattctctagaagatttttcaatgctccagcgttcaacaacgtacatactagacgcacgttattatcagctattgcataatacaaggcactatgtccatggacatccgccttaaatgtatctttactagagagaaagcttttcagctgcttagacttccaagtattaattcgtgacagatccatgtctgaaacgagacgctaattagtgtatattttttcattttttataattttgtcatattgcaccagaattaataatatctttaatagatctgattagtagatacatggctatcgcaaaacaacatatacacatttaataaaaataatatttattaagaaaattcagatttcacgtacccatcaatataaataaaataatgattccttacaccgtacccatattaaggagattccaccttacccataaacaatataaatccagtaatatcatgtctgatgatgaacacaaatggtgtattaaattccagtttttcaggagatgatctcgccgtagctaccataatagtagatgcctctgctacagttccttgttcgtcgacatctatctttgcattctgaaacattttataaatatataatgggtccctagtcatatgtttaaacgacgcattatctggattaaacatactaggagccatcatttcggctatcgacttaatatccctcttattttcgatagaaaatttagggagtttaagattgtacactttattccctaattgagacgaccaatagtctaattttgcagccgtgatagaatctgtgaaatgggtcatattatcacctattgccaggtacatactaatattagcatccttatacggaaggcgtaccatgtcatattctttgtcatcgattgtgattgtatttccttgcaatttagtaactacgttcatcatgggaaccgttttcgtaccgtacttattagtaaaactagcattgcgtgttttagtgatatcaaacggatattgccatatacctttaaaatatatagtattaatgattgcccatagagtattattgtcgagcatattagaatctactacattagacataccggatctacgttctactatagaattaattttattaaccgcatctcgtctaaagtttaatctatataggccgaatctatgatattgttgataatacgacggtttaatgcacacagtattatctacgaaactttgataagttagatcagtgtacgtatatttagatgttttcagcttagctaatcctgatattaattctgtaaatgctggacccagatctctttttctcaaatccatagtcttcaataattctattctagtattacctgatgcaggcaatagcgacataaacatagaaaacgaataaccaaacggtgagaagacaatattatcatcttgaatatttttatacgctactataccggcattggtaaatccttgtagacgataggcggacgctgaacacgctaacgatagtatcaataacgcaatcatgattttatggtattaataattaaccttatttttatgttcggtataaaaaaattattgatgtctacacatccttttgtaattgacatctatatatccttttgtataatcaactctaatcactttaacttttacagttttccctaccagtttatccctatattcaacatatctatccatatgcatcttaacactctctgccaagatagcttcagagtgaggatagtcaaaaagataaatatatagagcataatcattctcgtatactctgccctttattacatcacccgcattgggcaacgaataacaaaatgcaagcatcttgttaacgggctcgtaaattgggataaaaattatgtttttattgtcttatatctattttattcaagagaatattcaggaatttctttttccggttgtatctcgtcgcagtatatatcatttgtacattgtttcatattttttaatagtttacaccttttagtaggactagtatcgtacaattcatagctgtattttgaattccaatcacgcataaaaatatcttccaattgttgacgaagacctaatccatcatccggtgtaatattaatagatgctccacatgtatccgtaaagtaatttcctgtccaatttgaggtacctatataggccgttttatcggttaccatatatttggcatggtttaccctagaatacggaatgggaggatcagcatctggtacaataaatagctttacttctatatttatgtttttagattttagcatagcgatagatcttaaaaagtttctcatgataaacgaagatcgttgccagcaactaatcaatagcttaacggatacttgtctgtctatagcggatcttcttaattcatcttctatataaggccaaaacaaaattttacccgccttcgaataaataatagggataaagttcataacagatacataaacgaatttactcgcatttctaatacatgacaataaagcggttaaatcattggttctttccatagtacatagttgttgcggtgcagaagcaataaatacagagtgtggaacgccgcttacgttaatactaagaggatgatctgtattataatacgacggataaaagtttttccaattatatggtagattgttaactccaagataccagtatacctcaaaaatttgagtgagatccgctgccaagttcctattattgaagatcgcaatacccaattccttgacctgagttagtgatctccaatccatgttagcgcttcctaaataaatatgtgtattatcagatatccaaaattttgtatgaagaactcctcctaggatatttgtaatatctatgtatcgtacttcaactccggccatttgtagtctttcaacatcctttaatggtttgttagatttattaacggctactctaactcgtactcctcttttgggtaattgtacaatctcgtttaatattatcgtgccgaaattcgtacccacttcatccgataaactccaataaaaagatgatatatctagtgtttttgtggtattggatagaatttccctccacatgttaaatgtagacaaatatactttatcaaattgcatacctataggaatagtttctgtaatcactgcgattgtattatccggattcattttatttgttaaaagaataatcctatatcacttcactctattaaaaatccaagtttctatttctttcatgactgattttttaacttcatccgtttccttatgaagatgatgtttggcaccttcataaatttttatttctctattacaatttgcatgttgcatgaaataatatgcacctaaaacatcgctaatcttattgtttgttccctggagtatgagagtcgggggggtgttaatcttggaaattatttttctaaccttgttggtagccttcaagacctgactagcaaatccagccttaattttttcatgattgactaatgggtcgtattggtatttataaactttatccatatctctagatactgattctggacatagctttccgactggcgcatttggtgtgatggttcccataagtttggcagctagcagattcagtcttgaaacagcatctgcattaactagaggagacattagaatcattgctgtaaacaagtttggattatcgtaagaggctagctcccatggaatgacccaataagtagatttaatagttaccacgtgctgtaccaaagtcatcaatcatcattttttcaccattacttcttccatgtccaatatgatcatgtgagaatactaaaattcctaacgatgatatgttttcagctagttcgtcataacgtccagaatgtttaccagctccatgacttatgaatactaatgccttaggatatgtaataggtttccaatatttacaatatatgtaatcattgtccagattgaacatacagtttgcactcatgattcacgttatataactatcaatattaacagttcgtttgatgatcatattatttttatgttttattgataattgtaaaaacatacaattaaatcaatatagaggaaggagacggctactgtcttttgtaagatagtcatggcgactaaattagattatgaggatgctgttttttactttgtggatgatgataaaatatgtagtcgcgactccatcatcgatctaatagatgaatatattacgtggagaaatcatgttatagtgtttaacaaagatattaccagttgtggaagactgtacaaggaattgatgaagttcgatgatgtcgctatacggtactatggtattgataaaattaatgagattgtcgaagctatgagcgaaggagaccactacatcaattttacaaaagtccatgatcaggaaagtttattcgctaccataggaatatgtgctaaaatcactgaacattggggatacaaaaagatttcagaatctagattccaatcattgggaaacattacagatttgatgaccgacgataatataaacatcttgatactttttctagaaaaaaaattgaattgatgatataggggtcttcataacgcataattattacgttagcattctatatccgtgttaaaaaaaattatcctatcatgtatttgagagttttatatgtagcaaacatgatagctgtgatgccaataagctttagatattcacgcgtgctagtgttagggatggtattatctggtggtgaaatgtccgttatataatctacaaaacaatcatcgcatatagtatgcgatagtagagtaaacatttttatagtttttactggattcatacatcgtctacccaattcggttataaatgaaattgtcgccaatcttacacccaaccccttgttatccattagcatagtattaacttcgttatttatgtcataaactgtaaatgattttgtagatgccatatcatacatgatattcatgtccctattataatcattactaactttatcacaatatatgttgataatatctatatatgatctagtctttgtgggcaactgtctatacaagtcgtctaaacgttgtttactcatatagtatctaacagccatcattacatggtcccgttccgttgatagataatcgagtatgttagtggacttgtcaaatctatataccatattttctggaagtggatatacatagtcgtgatcaacattattgctagcctcatcttctatatcctgtactataccattatctatatcatctacataatctatgatattattacacataaacatcgacaacatactattgtttattatctaagtcctgttgatccaaacccttgatctcctctatttgtactatctagagattgtacttcttccagttctggataatatatacgttgatagattagctgagctattctatctccagtatttacattaaacgtacattttccattattaataagaatgactcctatgtttcccctataatcttcgtctattacaccacctcctatatcaatgccttttagtgacagaccagacctaggagctattctaccatagcagaacttaggcatggacatactaatatctgtcttaattaactgtctttctcctggagggatagtataatcgtaagcgctatacaaatcatatccggcagcacccggcgattgcctagtaggagatttagctctgttagtttccttaacaaatctaactggtgagttaatattcatgttgaacataaaactaatattttatttcaaaattatttaccatcccatatattccatgaataagtgtgatgattgtacacttctatagtatctatatacgatccacgataaaatcctcctatcaatagcagtttattatccactatgatcaattctggattatccctcggataaataggatcatctatcagagtccatgtattgctggattcacaataaaattccgcatttctaccaaccaagaataaccttctaccgaacactaacgcgcatgatttataatgaggataataagtggatggtccaaactgccactgatcatgattgggtagcaaatattctgtagttgtatcagtttcagaatgtcctcccattacgtatataacattgtttatggatgccactgctggattacatctaggtttcagaagactcggcatattaacccaagcagcatccccgtggaaccaacgctcaacagatgtgggatttggtagacctcctactacgtataatttattgttagcgggtatcccgctagcatacagtctggggctattcatcggaggaattggaatccaattgtttgatatataatttaccgctatagcattgttatgtatttcattgttcatccatccaccgatgagatatactacttctccaacatgagtacttgtacacatatggaatatatctataatttgatccatgttcataggatactctatgaatggatacttgtatgatttgcgtggttgtttatcacaatgaaatattttggtacagtctagtatccattttacattatttatacctctgggagaaagataatttgacctgattacatttttgataaggagtagcagatttcctaatttatttcttcgctttatataccacttaatgacaaaatcaactacataatcctcatctggaacatttagttcatcgctttctagaataagtttcatagatagataatcaaaattgtctatgatgtcatcttccagttccaaaaagtgtttggcaataaagtttttagtatgacataagagattggatagtccgtattctatacccatcatgtaacactcgacacaatattcctttctaaaatctcgtaagataaagtttatacaagtgtagatgataaattctacagaggttaatatagaagcacgtaataaattgacgacgttatgactatctatatatacctttccagtatacgagtaaataactatagaagttaaactgtgaatgtcaaggtctagacaaaccctcgtaactggatctttatttttcgtgtatttttgacgtaaatgtgtgcgaaagtaaggagataactttttcaatatcgtagaattgactattatattgcctcctatggcatcaataattgttttgaatttcttagtcatagacaatgctaatatattcttacagtacacagtattgacaaatatcggcatttatgtttctttaaaagtcaacatctagagaaaaatgattatctttttgagacataactcccattttttggtattcacccacacgtttttcgaaaaaattagtttttccttccaatgatatattttccatgaaatcaaacggattggtaacattataaatttttttaaatcccaattcagaaatcaatctatccgcgacgaattctatatatgttttcatcatttcacaattcattcctataagtttaactggaagagccgcagtaagaaattcttgttcaatggatactgcatctgttataatagatctaacggtttcttcactcggtggatgcaataaatgtttaaacatcaaacatgcgaaatcgcagtgcagaccctcgtctctactaattagttcgttggaaaacgtgagtccgggcattaggccacgctttttaagccaaaatatggaagcgaatgatccggaaaagaagattccttctactgcagcaaaggcaataagtctctctccataaccggcgctgtcatgtatccacttttgagcccaatcggccttcttttttacacaaggcatcgtttctatggcattaaagagatagtttttttcattactatctttaacataagtatcgatcaaaagactatacatttccgaatgaatgttttcaatggccatctgaaatccgtagaaacatctagcctcggtaatctgtacttctgtacaaaatcgttccgccaaattttcattcactattccgtcactggctgcaaaaaacgccaatacatgttttataaaatatttttcgtctggtgttagtttattccaatcattgatatctttagatatatctacttcttccactgtccaaaatgatgcctctgcctttttatacatgttccagatgtcatgatattggattgggaaaataacaaatctatttggatttggtgcaaggatgggttccataactaaattaacaataacaataaattttttttcagttatctatatgcctgtacttggattttttgtacatcgatatcgccgcaatcactacaataattacaagtattattgatagcattgttattagtactatcataattaaattatctacattcatgggtgctgaataatcgttattatcatcattatcattttgtaattgtgacatcatactagataaatcgtttgcgagattgttgtgggaagcgggcatggaggatgcattatcattattatttaacgccttccatttggattcacaaatgttacgcacattcaacattttatggaaactataattttgtgaaaacaaataacaagaaaactcgtcatcgttcaaatttttaacgatagtaaaccgattaaacgtcgagctaatttctaacgctagcgactctgttggatatgggtttccagatatatatcttttcagttcccctacgtatctataatcatctgtaggaaatggaagatatttccatttatctactgttcctaatatcatatgtggtggtgtagtagaaccattaagcgcgaaagatgttatttcgcatcgtattttaacttcgcaataatttctggttagataacgcactctaccagtcaagtcaatgatattagcctttacagatatattcatagtagtcgtaacgatgactccatcttttagatgcgatactcctttgtatgtaccagaatcttcgtacctcaaactcgatatatttaaacaagttaatgagatattaacgcgttttatgaatgatgatatataaccagaagttttatcctcggtggctagcgctataaccttatcattataataccaactagtgtgattaatatgtgacacgtcagtgtgggtacaaatatgtacattatcgtctacgtcgtattcgatacatccgcatacagccaacaaatataaaatgacaaatactctaacgacgttcgtacccatcttgatgcggtttaataaatgttttgatttcaatttattgtaaaaaaagattcggttttatactgttcgatattctcattgcttatattttcatctatcatctccacacagtcaaatccgtggttagcatgcacctcatcaaccggtaaaagactatcggactcttctatcattataactctagaatatttaatttggtcattattaatcaagtcaattatcttatttttaacaaacgtgagtattttactcatttttataaaaacttttagaaatatacagactctatcgtgtgtctatatcttctttttatatccaatgtatttatgtctgatttttcttcatttatcatatataatggtccaaattctacacgtgcttcggattcatccagatcattaaggttcttataattgtaacatccttctcttccctcttctacatcttccttcttattcttattcttagcgtcacagaatctaccacagcaggatcccatgacgagcgtcatattaaactaatccattttcaattataatatatgattagtaatgaccattaaaataaaaaatattcttcataaccggcaagaaagtgaaaagttcacattgaaactatgtcagtagtatacatcatgaaatgatgatatatatactctattttggtggaggattatatgatataattcgtggataatcatttttaagacacatttctttattcgtaaatcttttcacgttaaatgagtgtccatattttgcaatttcttcatatgatggcggtgtacgtggacgaggctgctcctgttcttgttgtagtcgccgactgtcgtgtctgcgtttagatccctccattatcgcgattgcgtagatggagtactattttataccttgtaattaaatttttttattaattaaacgtataaaaacgttccgtatctgtatttaagagccagatttcgtctaatagaacaaatagctacagtaaaaataactagaataattgctacacccactagaaaccacggatcgtaatacggcaatcggttttcgataataggtggaacgtatattttatttaaggacttaacaattgtctgtaaaccacaatttgcttccgcggatcctgtattaactatctgtaaaagcatatgttgaccgggcggagccgaacattctccgatatctaatttctgtatatctataatattattaacctccgcatacgcattacagttcttttctagcttggataccgcactaggtacatcgtctagatctattcctatttcctcagcgatagctcttctatccttttccggaagcaatgaaatcacttcaataaatgattcaaccatgagtgtgaaactaagtcgagaattactcatgcatttgttagttattcggagcgcgcaatttttaaactgtcctataacctctcctatatgaatagcacaagtgacattagtagggatagaatgttgagctaatttttgtaaataactatctataaaaagattatacaaagttttaaactctttagtttccgccatttatccagtctgagaaaatgtctctcataataaatttttccaagaaactaattgggtgaagaatggaaacctttaatctatatttatcacagtctgttttggtacacatgatgaattcttccaatgccgtactaaattcgatatctttttcgatttctggatatgtttttaataaagtatgaacaaagaaatggaaatcgtaataccagttatgtttaactttgaaattgttttttattttcttgttaatgattccagccacttgggaaaagtcaaagtcgtttaatgccgatttaatacgttcattaaaaacaaactttttatcctttagatgaattattattggttcattggaatcaaaaagtaagatattatcgggtttaagatctgcgtgtaaaaagttgtcgcaacagggtagttcgtagattttaatgtataacagagccatctgtaaaaagataaactttatgtattgtaccaaagatttaaatcctaatttgatagctaactcggtatctactttatctgccgaatacagtgctaggggaaaaattataatgtttcctctttcatattcgtagttagttctcttttcatgttcgaaaaagtgaaacatgcggttaaaatagtttataacattaatattactgttaataactgccggataaaagtgggatagtaatttcacgaatttgatactgtcctttctctcgttaaacgcctttaaaaaaactttagaagaatatctcaatgagagttcctgaccatccatagtttgtatcaataatagcaacatatgaagaacacgtttatacagagtatgtaaaaatgttaatttatagtttaatcccatggcccacgcacacacgattaattttttttcatctccctttagattgttgtatagaaatttgggtactgtgaactccgccgtagtttccatgggactatataattttgtggcctcgaatacaaattttactacatagttatctatcttaaagactataccatatcctcctgtagatatgtgataaaaatcgtcgtttataggataaaatcgtttatccttttgttggaaaaaggatgaattaatgtaatcattctcttctatctttagtagtgtttccttattaaaattcttaaaataatttaacaatctaactgacggagcccaattttggtgtaaatctaattgggacattatattgttaaaatacaaacagtctcctaatataacagtatctgataatctatggggagacatccattgatattcaggggatgaatcattggcaacacccatttattgtacaaaaagccccaatttacaaacgaaagtccaggtttgatagagacaaacaattaactattttgtctctgtttttaacacctccacagtttttaatttctttagtaatgaaattattcacaatatcagtatcttctttatctaccagagattttactaacttgataaccttggctgtctcattcaatagggtagtaatatttgtatgtgtgatattgatatctttttgaattgtttcttttagaagtgattctttgatggtgccagcatacgaattacaataatgcagaaactcggttaacatgcaggaattatagtaagccaattccaattgttgcctgtgttgtattagagtgtcaatatgagcaatggtgtccttgcgtttctctgatagaatgcgagcagcgattttggcgttatcatttgacgatatttctggaatgacgaatcctgtttctactaactttttggtaggacaaagtgaaacaatcaagaagatagcttctcctcctatttgtggaagaaattgaactcctctagatgatctactgacgatagtatctccttgacagatattggaccgaattacagaagtacctggaatgtaaagccctgaaaccccctcattttttaagcagattgttgccgtaaatcctgcactatgcccaagatagagagctcctttggtgaatccatctctatgtttcagtttaaccaagaaacagtcagctggtctaaaatttccatctctatctaatacagcatctaacttgatgtcaggaactatgaccggtttaatgttatatgtaacattgagtaaatccttaagttcataatcatcactgtcatcagttatgtacgatccaaacaatgtttctaccggcatagtggatacgaagatgctatccatcagaatgtttccctgattagtattttctatatagctattcttctttaaacgattttccaaatcagtaactatgttcatttttttaggagtaggacgcctagccagtatggaagaggattttctagatcctctcttcaacatctttgatctcgatggaatgcaaaaccccatagtgaaacaaccaacgataaaaataatattgtttttcactttttataattttaccatctgactcatggattcattaatatctttataagagctactaacgtataattctttataactgaactgagatatatacaccggatctatggtttccataattgagtaaatgaatgctcggcaataactaatggcaaatgtatagaacaacgaaattatactagagttgttaaagttaatattttctatgagctgttccaataaattatttgttgtgactgcgttcaagtcataaatcatcttgatactatccagtaaaccgtttttaagttctggaatattatcatcccattgtaaagcccctaattcgactatcgaatatcctgctctgatagcagtttcaatatcgacggacgtcaatactgtaataaaggtggtagtattgtcatcatcgtgataaactacgggaatatggtcgttagtaggtacggtaactttacacaacgcgatatataactttccttttgtaccatttttaacgtagttgggacgtcctgcagggtattgttttgaagaaatgatatcgagaacagatttgatacgatatttgttggattcctgattattcactataatataatctagacagatagatgattcgataaatagagaaggtatatcgttggtaggataatacatccccattccagtattctcggatactctattgatgacactagttaagaacatgtcttctattctagaaaacgaaaacatcctacatggactcattaaaacttctaacgctcctgattgtgtctcgaatgcctcgtacaaggatttcaaggatgccatagattctttgaccaacgatttagaattgcgtttagcatctgatttttttattaaatcgaatggtcggctctctggtttgctaccccaatgataacaatagtcttgtaaagataaaccgcaagaaaatttatacgcatccatccaaataaccctagcaccatcggatgatattaatgtattattatagattttccatccacagttattgggccagtatactgttagcaacggtatatcgaatagattactcatgtaacctactagaatgatagttcgtgtactagtcataatatctttaatccaatctaagaaatttaaaattagattttttacactgttaaagttaacaaaagtattacccgggtacgtggatatcatatatggcattggtccattatcagtaatagctccataaactgatacggcgatggtttttatatgtgtttgatctaacgaggaagaaattcgcgcccacaattcatctctagatatgtatttaatatcaaacggtaacacatcaatttcgggacgcgtatatgtttctaaatttttaatccaaatataatgatgacctatatgccctattatcatactgtcaactatagtacacctagggaacttacgatacatctgtttcctataatcgttaaattttacaaatctataacatgctaaaccttttgacgacaaccattcattaatttctgatatggaatctgtattctcgataccgtatcgttctaaagccagtgctatatctccctgttcgtgggaacgctttcgtataatatcgatcaacggataatctgaagtttttggagaataatatgactcatgatctatttcgtccataaacaatctagacataggaattggaggcgatgatcttaattttgtgcaatgagtcgtcaatcctataacttctaatcttgtaatattcatcatcgacataatactatctatgttatcatcgtatattagtataccatgaccttcttcatttcgtgccaaaatgatatacagtcttaaataattacgcaatatctcaatagtttcataattgttagctgttttcatcaaggtttgtatcctgtttaacatgatggcgttctataacgtctctattttctatttttaattttttaaatttttaacgatttactgtggctagatacccaatctctctcaaatatttttttagcctcgcttacaagctgtttatctatactattaaaactgacgaatccgtgattttggtaatgggttccgtcgaaatttgccgaagtgatatgaacatattcgtcgtcgactatcaacaattttgtattattctgaatagtgaaaaccttcacagatagatcattttgaacacacaacgcatctagacttttggcggttgccatagaatatacgtcgttcttatcccaattaccaactagaagtctgatcttaactcctctattaatggctgcttctataatggagttgtaaatgtcgggccaatagtagctattaccgtcgacacgtgtagtgggaactatggccaaatgttcaatatctatactagtcttagctgacctgagtttatcaataactacatcggtatctagatctctagaatatcccaataggtgttccggagaatcagtaaagaacactccacctataggattcttaatatgatacgcagtgctaactggcaaacaacaagccgcagagcataaattcaaccatgaattttttgcgctattaaaggctttaaaagtatcaaatcttctacgaagatctgtggccagcgggggataatcagaatatacacctaacgttttaatcgtatgtatagatcctccagtaaatgacgcgtttcctacataacatctttcatcatctgacacccaaaaacaaccgagtagtagtcccacattattttttttatctatattaacggttataaaatttatatccgggcagtgactttgtagctctcccagatttcttttccctcgttcatctagcaaaactattattttaatccctttttcagatgcctcttttagtttatcaaaaataagcgctcccctagtcgtactcagaggattacaacaaaaagatgctatgtatatatatttcttagctagagtgataatttcgttaaaacattcaaatgttgttaaatgatcggatctaaaatccatattttctggtagtgtttctaccagcctacattttgctcccgcaggtaccgatgcaaatggccacatttagttaacataaaaacttatacatcctgttctatcaacgattctagaatatcatcggctatatcgctaaaattttcatcaaagtcgacatcacaacctaactcagtcaatatattaagaagttccatgatgtcatcttcgtctatttctatatccgtatccattgtagattgttgaccgattatcgagtttaaatcattactaatactcaatccttcagaatacaatctgtgtttcattgtaaatttataggcggtgtatttaagttggtagattttcaattatgtattaatatagcaacagtagttcttgctcctccttgattctagcatcctcttcattattttcttctacgtacataaacatgtccaatacgttagacaacacaccgacgatggcggccgctacagacacgaatatgactaaaccgatgaccatttaaaaacccctctctagctttcacttaaactgtatcgatcattcttttagcacatgtataatataaaaacattattctatttcgaatttaggcttccaaaaatttttcatccgtaaaccgataataatatatatagacttgttaatagtcggaataaatagattaatgcttaaactatcatcatctccacgattagagatacaatatttacattctttttgctgtttcgaaactttatcaatacacgttaatacaaacccaggaaggagatattgaaactgaggctgttgaaaatgaaacggtgaatacaataattcagataatgtaaaatcatgattccgtattctgatgatattagaactgctaatggatgtcgatggtatgtatctaggagtatctattttaacaaagcatcgatttgctaatatacaattatccttttgattaattgttattttattcatattcttaaaaggtttcatatttatcaattcttctacattaaaaatttccatttttaatttatgtagccccgcaatactcctcattacgtttcattttttgtctataatatccattttgttcatctcggtacatagattatccaattgagaagcgcatttagtagttttgtacattttaagtttattgacgaatcgtcgaaaactagttatagttaacattttattatttgataccctgatattaatacccctgccgttactattatttataactgatgtaatccacgtaacattggaattaactatcgatagtaatgcatcgacgcttccaaaattgtctattataaactcaccgataatttttttattgcatgttttcatattcattaggattatcaaatctttaatcttattacgattgtatgcgttgatattacaagacgtcattctaaaagacggaggatctccatcaaatgccagacaatcacgtacaaagtacatggaaataggttttgttctattgcgcatcatagatttatatagaacacccgtagaaatactaatttgttttactctataaaatactaatgcatctatttcatcgttttgtataacgtctttccaagtgtcaaattccaaatttttttcattgatagtaccaaattcttctatctctttaactacttgcatagataggtaattacagtgatgcctacatgccgttttttgaaactgaatagatgcgtctagaagcgatgctacgctagtcacaatcaccactttcatatttagaatatatatatgtaaaaatatagtagaatttcattttgtttttttctatgctataaatgaattctcattttgcatctgctcatactccgttttatattaataccaaagaaggaagatatctggttctaaaagccgttaaagtatgcgatgttagaactgtagaatgcgaaggaagtaaagcttcctgcgtactcaaagtagataaaccctcatcgcccgcgtgtgagagaagaccttcgtccccgtccagatgcgagagaatgaataaccctggaaaacaagttccgtttatgaggacggacatgctacaaaatatgttcgcggctaatcgcgataatgtagcttctagacttttgtcctaaaatactattatatccttttcgatattaataaatccgtgtcgtccaggttttttatctctttcagtatgtgaatagataggtattttatctctattcatcatcgaatttaagagatccgataaacattgtttgtattctccagatgtcagcatctgatacaacaatatatgtgcacataaacctctggcacttatttcatgtaccttccccttatcactaaggagaatagtatttgagaaatatgtatacatgatattatcatgaattagatatacagaatttgtaacactctcgaaatcacacgatgtgtcggcgttaagatctaatatatcactcgataacacattttcatctagatacactagacattttttaaagctaaaatagtctttagtagtaacagtaactatgcgattattttcatcgatgatacatttcatcggcatattattacgcttaccatcaaagactataccatgtgtatatctaacgtattctagcatggttgccatacgcgcattaaacttttcaggatctttggatagatcttccaatctatctatttgagaaaacatttttatcatgttcaatagttgaaacgtcggatccactatatagatattatctataaagattttaggaactacgttcatggtatcctggcgaatattaaaactatcaatgatatgattatcgttttcatcttttatcaccatatagtttctaagatatgggattttacttaatataatattatttcccgtgataaattttattagaaaggccaaatctataagaaaagtcctagaattagtctgaagaatatctatatcgccgtatagtatatttggattaattagatatagagaatatgatccgtaacatatacaacttttattatggcgtctaagatattcttccatcaacttattaacatttttgactagggaagatacattatgacgtcccattacttttgccttgtctattactgcgacgttcatagaatttagcatatctcttgccaattcttccattgatgttacattataagaaattttagatgaaattacatttggagctttaatagtaagaactcctaatatgtccgtgtatgtggtcactaatacagattgtagttctataatcgtaaataatttacctatattatatgtttgagtctgtttagaaaagtagctaagtatacgatcttttatttctgatgcagatgtatcaacatcggaaaaaaatctttttttattcttttttactaaagatacaaatatgtctttgttaaaaacagttattttctgaatatttctagcttgtaattttaacatatgatattcgttcacactaggtactctgcctaaataggtttctataatctttaatgtaatattaggaagagtattctgatcaggattcctattcattttgaggatttaaaactctgattattgtctaatatggtctctacgcaaactttttcacagagcgatagagtttttgataactcgtttttcttaagaaatataaaactactgtctccagagctcgctctatcttttattttatctaattcgatacaaactcctgatactggttcagaaagtaattcattaattttcagtcctttatagaagatatttaatatagataatacaaaatcttcagtttttgatatcgatctgattgatcctagaactagatatattaataacgtgctcattaggcagtttatggcagcttgataattagatatagtatattccagttcatatttattagataccgcattgcccagattttgatattctatgaattcctctgaaaataaatccaaaataactagacattctattttttgtggattagtgtactctcttccctctatcatgttcactactggtgtccacgatgataaatatctagagggaatataatatagtccataggatgccaatctagcaatgtcgaataactgtaattttattcttcgctcttcattatgaattgattcttgaggtataaacctaacacaaattatattattagacttttcgtatgtaatgtctttcatgttataagtttttaatcctggaatagaatctattttaatgaggcttttaaacgcagagttctccaacgagtcaaagcataatactctgttgtttttcttatatacgatgttacgattttcttctttgaatggaataggtttttgaattagtttataattacaacataatagataaggaagtgtgcaaatagtacgcggaaaaaacataatagctcccctgttttcatccatggttttaagtaaatgatcactggcttctttagtcaatggatattcgaacattaaccgtttcatcatcattggacagaatccatatttcttaatgtaaagagtgatcaaatcattgtgtttattgtaccatcttgttgtaaatgtgtattcggttatcggatctgctcctttttctattaaagtatcgatgtcaatctcgtctaagaattcaactatatcgacatatttcatttgtatacacataaccattactaacgtagaatgtataggaagagatgtaacgggaacagggtttgttgattcgcaaactattctaatacataattcttctgttaatacgtcttgcacgtaatctattatagatgccaagatatctatataattattttgtaagatgatgttaactatgtgatctatataagtagtgtaataattcatgtattttgatatatgttccaactctgtctttgtgatgtctagtttcgtaatatctatagcatcctcaaaaaatatattcgcatatattcccaagtcttcagttctatcttctaaaaaatcttcaacgtatggaatataataatctattttacctcttctgatatcattaatgatatagtttttgacactatcttctgtcaattgattcttattcactatatctaagaaacggatagcgtccctaggacgaactactgccattaatatctctattatagcttctggacataattcatctattataccagaattaatgggaactattccgtatctatctaacatagttttaagaaagtcagaatctaagacttgatgttcatatattggttcatacatgaaatgatctctattgatgatagtgactatttcattctctgaaaattggtaactcattctatatatgctttccttgttgatgaaggatagaatatactcaatagaatttgtaccaacaaactgttctcttatgaatcgtatatcatcatctgaaataatcatgtaaggcatacatttaacaattagagacttgtctcctgttatcaatatactattcttgtgataatttatgtgtgaggcaaatttgtccacgttctttaattttgttatagtagatatcaaatccaatggagctacagttcttggcttaaacagatatagtttttctggaacaaattctacaacattattataaaggactttgggtaaataagtgggatgaaatcctattttaattaatgcgatagccttgtcctcgtgcagatatccaaacgcttttgtgatagtatggcattcattgtctagaaacgctctacgaatatctgtgacagatatcatctttagagaatatactagtcgcgttaatagtactacaatttgtattttttaatctatctcaataaaaaaattaatatgtatgattcaatgtataactaaactactaactgttattgataactagaatcagaatctaatgatgacgtacccaagaagtttatctactgccaatttagctgcattatttttagcatctcgtttagattttccatctgccttatcgaatactcttccgtcgatatctacacaggcataaaatgtaggagagttactaggcccaactgattcaatacgaaaagaccaatctctcttagttatttggcagtactcattaataacggtgacagggttagcatctttccaatcaataatttttttagccggaataacatcatcaaaagacttatgatcctctctcattgatttttcgcgggatacatcatctattatgacgtcagccataacatcagcatccggcttatccgcctccgttgtcataaaccaacgaggaggaatatcgtcggagctgtacaccatagcactacgttgaagatcgtacagagctttattaacttctcgcttctccatattaagttgtctagttagttgtgcagcagtagctccttcgattccaatggttttaatagcctcacacacaatctctgcgttagaacgttcgtcgatatagattttagacatttttagagagaactaacacaaccagcaataaaactgaacctactttatcatttttttattcatcatcctctggtggttcgtcgttcctatcaaatgtagctctgattaacccgtcatctataggtgatgctggttctggagattctggaggagatggattattatctggaagaatctctgttatttccttgttttcatgtatcgattgcgttgtaacattaagattgcgaaatgctctaaatttgggaggcttaaagtgttgtttgcaatctctacacgcgtgtctaactagtggaggttcgtcagctgctctagtttgaatcatcatcggcgtagtattcctacttttacagttaggacacggtgtattgtatttctcgtcgagaacgttaaaataatcgttgtaactcacatcctttattttatctatattgtattctactcctttcttaatgcattttataccgaataagagatagcgaaggaattctttttcggtgccgctagtacccttaatcatatcacatagtgttttatattccaaatttgtggcaatagacggtttatttctatacgatagtttgtttctggaatcctttgagtattctataccaatattattctttgattcgaatttagtttcttcgatattagattttgtattacctatattcttgatgtagtactttgatgatttttccatggcccattctattaagtcttccaagttggcatcatccacatattgtgatagtaattctcggatatcagtagcggctaccgccattgatgtttgttcattggatgagtaactactaatgtatacattttccatttataacacttatgtattaactttgttcatttatattttttcattattatgttgatattaacaaaagtgaatatatatatatgttaataattgtattgtggttatacggctacaattttataatgagtgaaagtcagtgtccgatgatcaatgacgatagctttactctgaaaagaaagtatcaaatcgatagtgcggagtcaacaataaaaatggataagaagaggataaagtttcagaatagagccaaaatggtaaaagaaataaatcagacaataagagcagcacaaactcattacgagacattgaaactaggatacataaaatttaagagaatgattaggactactactctagaagatatagcaccatctattccaaataatcagaaaacttataaactattctcggacatttcagccatcggcaaagcatcacagaatccgagtaagatggtatatgctctgctgctttacatgtttcccaatttgtttggagatgatcatagattcattcgttatagaatgcatccaatgagtaaaatcaaacacaagatcttctctcctttcaaacttaatcttattagaatattagtggaagaaagattctataataatgaatgcagatctaataaatggaaaataattggaacacaagttgataaaatgttgatagctgaatctgataaatatacaatagatgcaaggtataacctaaaacccatgtatagaatcaagggagaatctgaagaagataccctcttcatcaaacagatggtagaacaatgtgtgacatcccaggaattggtggaaaaagtgttgaagatactgtttagagatttgttcaagagtggagaatacaaagcgtacagatacgatgatgatgtagaaaatggattcattggattggatacactaaaattaaacattgttcatgatatagttgaaccatgtatgcctgttcgtaggccagtggctaagatactgtgtaaagaaatggtaaataaatactttgagaatccgctacatattattggtaaaaatcttcaagagtgcattgactttgttagtgaataggcatttcatctttctccaatactaattcaaattgttaaattaataatggatagtataaatagttattagttataagatagtaaaaataattattagaataagagtgtagtatcatagataactctcttctataaaaatggattttattcgtagaaagtatcttatatacacagtagaaaataatatagattttttaaaggatgatacattaagtaaagtaaacaattttaccctcaatcatgtactagctctcaagtatctagttagcaattttcctcaacatgttattactaaggatgtattagctaataccaatttttttgttttcatacatatggtacgatgttgtaaagtgtacgaagcggttttacgacacgcatttgatgcacccacgttgtacgttaaagcattgactaagaattatttatcgtttagtaacgcaatacaatcgtacaaggaaaccgtgcataaactaacacaagatgaaaaatttttagaggttgccgaatacatggacgaattaggagaacttataggcgtaaattatgacttagttcttaatccattatttcacggaggggaacccatcaaagatatggaaatcatttttttaaaactgtttaagaaaacagacttcaaagttgttaaaaaattaagtgttataagattacttatttgggcatacctaagcaagaaagatacaggcatagagtttgcggataatgatagacaagatatatatactctatttcaacaaactggtagaatcgtccatagcaatctaacagaaacgtttagagattatatctttcccggagataagactagctattgggtgtggttaaacgaaagtatagctaatgatgcggatatcgttcttaatagacccgccattaccatgtatgataaaattcttagttatatatactctgagataaaacaaggacgcgttaataaaaacatgcttaagttagtttatatctttgagcctgaaaaagatatcagagaacttctgctagaaatcatatatgatattcctggagatatcctatctattattgatgcaaaaaacgacgattggaaaaaatattttattagtttttataaagctaattttattaacggtaatacatttattagtgatagaacgtttaacgaggacttattcagagttgttgttcaaatagatcccgaatatttcgataatgaacgaattatgtctttattctctacgagtgctgcggacattaaacgatttgatgagttagatattaataacagttatatatctaatataatttatgaggtgaacgatatcacattagatacaatggatgatatgaagaagtgtcaaatctttaacgaggatacgtcgtattatgttaaggaatacaatacatacctgtttttgcacgagtcggatcccatggtcatagagaacggaatactaaagaaactgtcatctataaaatccaagagtagacggctgaacttgtttagcaaaaacattttaaaatattatttagacggacaattggctcgtctaggtcttgtgttagatgattataaaggagacttgttagttaaaatgataaaccatcttaagtctgtggaggatgtatccgcattcgttcgattttctacagataaaaaccctagtattcttccatcgctaatcaaaactattttagctagttataatatttccatcatcgtcttatttcaaaggtttttgagagataatctatatcatgtagaagaattcttggataaaagcatccatctaaccaagacggataagaaatatatacttcaattgataagacacggtagatcatagaacagaccaaatatattattaataatttgtatatacatagatataattatcacacatttttgataaatgggaactgctgcaacaattcagactcccaccaaattaatgaataaagaaaatgcagaaatgattttggaaaaaattgttgatcatatagttatgtatattagtgacgaatcaagtgattcagaaaataatcctgaatatattgattttcgtaacagatacgaagactatagatctctcattataaaaagtgatcacgagtttgtaaagctatgtaaaaatcatgcggagaaaagttctccagaaacgcaacaaatgattatcaaacacatatacgaacaatatcttattccagtatctgaagtactattaaaacctataatgtccatgggtgacataattacatataacggatgtaaagacaatgaatggatgctagaacaactctctaccctaaactttaacaatctccgcacatggaactcatgtagcataggcaatgtaacgcgtctgttttatacattttttagttatctgatgaaagataaactaaatatataagtataatcccattctaatactttaacctgatgtattacctgcatcttattagaatattaacctaactaaaagacataacataaaaactcattacatagttgataaaaagcggtaggatataaatattatggctgccaccgttccgcgttttgacgacgtgtacaaaaatgcacaaagaagaattctagatcaagaaacattttttagtagaggtctaagtagaccgttaatgaaaaacacatatctatttgataattacgcgtatggatggataccagaaactgcaatttggagtagtagatacgcaaacttagatgcaagtgactattatcccatttcgttgggattacttaaaaagttcgagtttctcatgtctctatataaaggtcctattccagtatacgaagaaaaagtaaatactgaattcattgctaatggatctttctccggtagatacgtatcatatcttagaaagttttctgctcttccaacaaacgagtttattagttttttgttactgacttccattccaatctataatatcttgttctggtttaaaaatactcagtttgatattactaaacacacattattcagatacgtctatacagataatgccaaacacctggcgttggctaggtatatgtatcaaacaggagactataagcctttgtttagtcgtctcaaagagaattatatatttaccggtcccgttccaatatgtatcaaagatatagatcaccctaatcttagtagagcaagaagtccatccgattatgagacattagctaatattagtactatattgtactttaccaagtatgatccggtattaatgtttttattgttttacgtacctgggtattcaattactacaaaaattactccagccgtagaatatctaatggataaactgaatctaacaaagagcgacgtacaactgttgtaaattattttatgcttcgtaaaatgtaggttttgaaccaaacattctttcaaagaatgagatgcataaaactttattatccaatagattgactatttcggacgtcaatcgtttaaagtaaacttcgtaaaatattctttgatcactgccgagtttaaaacttctatcgataattgtttcatatgttttaatatttacaagttttttggtccatggtccattaggacaaatatatgcaaaataatatcgttctccaagttctatagtctctggattatttttattatattcagtaaccaaatacatattagggttatctgcggatttataatttgagtgatgcattcgactcaacataaataattctagaggagacgatctactatcaaattcggatcgtaaatctgtttctaaagaacggagaatatctatacatacctgattagaattcatccgtccttcagacaacatctcagacagtctggttttgtacatcttaatcatattcttatgaaacttggaaacatctcttctagtttcactagtacctttattaattctctcaggtacagattttgaattcgacgatgccgagtatttcatcgttgtatatttcttcttcgattgcataatcagattcttatataccgcctcaaactctattttaaaattattaaacaatactctattattaatcagtcgttctaactctttcgctatttctatagacttatctacatcttgactgtctatctctgtaaacacggagtcggtatctccatacacgctacgaaaacgaaatctgtaatctataggcaacgatgttttcacaatcggattaatatctctatcgtccatataaaatggattacttaatggattggcaaaccgtaacataccgttagataactctgctccatttagtaccgattctagatacaagatcattctacgtcctatggatgtgcaactcttagccgaagcgtatgagtatagagcactatttctaaatcccatcagaccatatactgagttggctactatcttgtacgtatattgcatggaatcatagatggccttttcagttgaactggtagcctgttttagcatctttttatatctggctctctctgccaaaaatgttcttaatagtctaggaatggttccttctatcgatctatcgaaaattgctatttcagagatgaggttcggtagtctaggttcacaatgaaccgtaatatatctaggaggtggatatttctgaagcaatagctgattatttatttcttcttccaatctattggtactaacaacgacaccgactaatgtttccggagatagatttccaaagatacacacattaggatacagactgttataatcaaagattaatacattattactaaacattttttgttttggagcaaataccttaccgccttcataaggaaacttttgttttgtttctgatctaactaagatagttttagtttccaacaatagctttaacagtggacccttgatgactgtactcgctctatattcgaataccatggattgaggaagcacatatgttgacgcacccgcgtctgtttttgtttctactccataatactcccacaaatactgacacaaacaagcatcatgaatacagtatctagccatatctaaagctatgtttagattataatccttatacatctgagctaaatcaacgtcatcctttccgaaagataatttatatgtatcattaggtaaagtaggacataatagtacgactttaaatccattttcccaaatatctttacgaattactttacatataatatcctcatcaacagtcacataattacctgtggttaaaacctttgcaaatgcagcggctttgcctttcgcgtctgtagtatcgtcaccgatgaacgtcatttctctaactcctctatttaatactttacccatgcaactgaacgcgttcttggatatagaatccaatttgtacgaatccaatttttcaaatttttgaatgaatgaatatagatcgaaaaatatagttccattattgttattaacgtgaaacgtagtattggccatgccgcctactcccttatgactagactgatttctctcataaatacagagatgtacagcttcctttttgtccggagatctaaagataattttctctcctgttaataactctagacgattagtaatatatctcagatcaaagttatgtccgttaaaggtaacgacgtagtcgaacgttagttccaacaattgtttagctattcgtaacaaaactatttcagaacatagaactagttctcgttcgtaatccatttccattagtgactgtatcctcaaacatcctctatcgacggcttcttgtatttcctgttccgttaacatctcttcattaatgagcgtaaacaataatcgtttaccacttaaatcgatataacagtaacttgtatgcgagattgggttaataaatacagaaggaaacttcttatcgaagtgacactctatatctagaaataagtacgatcttgggatatcgaatctaggtatttttttagcgaaacagttacgtggatcgtcacaatgataacatccattgttaatctttgtcaaatattgctcgtccaacgagtaacatccgtctggagatatcccgttagaaatataaaaccaactaatattgagaaattcatccatggtggcattttgtatgctgcgtttctttggctcttctatcaaccacatatctgcgacggagcattttctatctttaatatctagattataacttattgtctcgtcaatgtctatagttctcatctttcccaacggcctcgcattaaatggaggaggagacaatgactgatatatttcgtccgtcactacgtaataaaagtaatgaggaaatcgtataaatacggtctcaccatttcgacatctggatttcagatataaaaatctgttttcaccgtgactttcaaaccaattaatgcaccgaacatccatttatagaatttagaaatatattttcatttaaatgaatcccaaacattggggaagagccgtatggaccattatttttatagtactttcgcaagcgggtttagacggcaacatagaagcgtgtaaacgaaaactatatactatagttagcactcttccatgtcctgcatgtagacggcacgcgactatcgctatagaggacaataatgtcatgtctagcgatgatctgaattatatttattattttttcatcagattatttaacaatttggcatctgatcccaaatacgcgatcgatgtgacaaaggttaaccctttataaacttaacccattataaaacttatgattagtcacaactgaaataaccgcgtgattattttttggtataattctacacggcatggtttctgtgactatgaattcaacccccgttacattagtgaaatctttaacaaacagcaagggttcgtcaaagacataaaactcattgtttacaatcgaaatagaccccctatcacacttaaaataaaaaatatccttatcctttaccaccaaataaaattctgattggtcaatgtgaatgtattcacttaacagttccacaaatttatttattaactccgaggcacatacatcgtcggtattttttatggcaaactttactcttccagcatccgtttctaaaaaaatattaacgagttccatttatatcatccaatattattgaaatgacgttgatggacagatgatacaaataagaaggtacggtacctttgtccaccatctcctccaattcatgctctattttgtcattaactttaatgtatgaaaacagtacgccacatgcttccatgacagtgtgtaacactttggatacaaaatgtttgacattagtataattgttcaagactgtcaatctataatagatagtagctataatatattctatgatggtattgaagaagatgacaaccttggcatattgatcatttaacacagacatggtatcaacagatagcttgaatgaaagagaatcagtaattggaataagcgtcttctcgatagagtgtccgtataccaacatgtctgatattttgatgtattccattaaattatttagttttttctttttattctcgttaaacagcatttctgtcaacggaccccaacatcgttgaccgattaagttttgattgatttttccgtgtaaggcgtatctagtcagatcgtatagcctatccaataatccatcatctgtgcgtagatcacatcgtacactttttaattctctatagaagagcgacagacatctggagcaattacagacagcaatttctttattctctacagatgtaagatacttgaagacattcctatgatgatgcagaattttggataacacggtattgatggtatctgttaccataattcctttgatggctgatagtgtcagagcacaagatttccaatctttgacaatttttagcaccattatctttgttttgatatctatatcagacagcatggtgcgtctgacaacacagggattaagacggaaagatgaaatgattctctcaacatcttcaatagataccttgctattttttctggcattatctatatgtgcgagaatatcctctagagaatcagtatcctttttgatgatagtggatctcaatgacatgggacgtctaaaccttcttattctatcaccagattgcatggtgatttgtcttctttcttttatcataatgtaatctctaaattcatcggcaaattgtctatatctaaaatcataatatgagatgtttacctctacaaatatctgttcgtccaatgttaaagtatttacatcagttttgtattccaaattaaacatggcaacggatttaattttatattcctctattaagtcctcgtcgataataacagaatgtagataatcatttaatccatcgtacatggttggaagatgcttgttgacaaaatctttaattgtcttgatgaaggtgggactatatctaacatcttgattaataaaatttataacattgtccataggatactttgtaactagttttatacacatctcttcatcggtaagtttagacagaatatcgtgaacaggtggtatattatattcatcagatatacgaagaacaatgtccaaatctatattgtttaatatattatatagatgtagcgtagctcctacaggaatatctttaactaagtcaatgatttcatcaaccgttagatctattttaaagttaatcatataggcattgatttttaaaaggtatgtagccttgactacattctcattaattaaccattccaagtcactgtgtgtaagaagattatattctatcataagcttgactacatttggtcccgataccattaaagaattcttatgatataaggaaacagattttaggtactcatctactctacaagaattttggagagccttaacgatatcagtgacgtttattatttcaggaggaaaaaacctaacattgagaatatcggaattaatagcttccagatacagtgattttggcaatagtccgtgtaatccataatccagtaacacgagctggtgcttgctagacaccttttcaatgtttaatttttttgaaataagctttgataaagccttcctcgcaaattccggatacatgaacatgttggcgacatgattaagtattgttttttcattatttttatattttctcaacaagttctcaataccccaatagatgatagaatatcacccaatgcgtccatgttgtctatttccaacaggtcgctatatccaccaatagaagtttttccaaaaaagattctaggaacagttctaccaccagtaatttgttcaaaatagtcacgcaattcattttcgggtttaaattctttaatatcgacaatttcatacgctcctcttttgaaactaaacttatttagaatatccagtgcatttctacaaaaaggacatgtatacttgacaaaaattgtcactttgttattggccaacctttgttgtacaaattcctcggccattttaatatttaagtgatataaaactatctcgacttatttaactctttagtcgagatatatggacgcagatagctatatgatagccaactacagaaggcaaacgctataaaaaacataattacgacgagcatatttataaatatttttattcagcattacttgatatagtaatattaggcacagtcaaacattcaaccactctcgatacattaactctctcattttctttaacaaattctgcaatatcttcgtaaaaagattcttgaaactttttagaatatctatcgactctagatgaaatagcgttcgtcaacatactatgttttgtatacataaaggcgcccattttaacagtttctagtgacaaaatgctagcgatcctaggatcctttagaatcacatagattgacgattcgtctctcttagtaactctagtaaaataatcatacaatctagtacgcgaaataatattatccttgacttgaggagatctaaacaatctagttttgagaacatcgataagttcatcgggaatgacatacatactatctttaatagaactcttttcatccagttgaatggattcgtccttaaccaactgattaatgagatcttctattttatcattttccagatgatatgtatgtccattaaagttaaattgtgtagcgcttctttttagtctagcagccaatactttaacatcactaatatcgatatacaaaggagatgatttatctatggtattaagaattcgtttttcgacatccgtcaaaaccaattcctttttgcctgtatcatccagttttccatcctttgtaaagaaattattttctactagactattaataagactgataaggattcctccataattgcacaatccaaactttttcacaaaactagactttacaagatctacaggaatgcgtacttcaggttttttagcttgtgattttttcttttgcggacattttcttgtgaccaactcatctaccatttcattgattttagcagtgaaataagctttcaatgcacgggcactgatactattgaaaacgagttgatcttcaaattccgccatttaagttcaccaaacaacttttaaatacaaatatatcaatagtagtagaataagaactataaaaaaataataattaaccaataccaaccccaacaaccggtattattagttgatgtgactgttttctcatcacttagaacagatttaacaatttctataaagtctgtcaaatcatcttccggagaccccataaatacaccaaatatagcggcgtacaacttatccatttatacattgaatattggcttttctttatcgctatcttcatcatattcatcatcaatatcaacaagtcccagattacgagccagatcttcttctacattttcagtcattgatacacgttcactatctccagagagtccgataacgttagccaccacttctctatcaatgattagtttcttgagcgcgaaagtaatttttgtttccgttccggatctatagaagacgataggtgtgataattgccttggccaattgtctttctcttttactgagtgattctagttcaccttctatagatctgagaatggatgattctccagtcgaaacatattctaccatggatccgtttaatttgttgatgaagatggattcatccttaaatgttttctctgtaatagtttccaccgaaagactatgcaaagaatttggaatgcgttccttgtgcttaatgtttccatagacggcttctagaagttgatacaacataggactagccgcggtaacttttatttttagaaagtatccatcgcttctatcttgtttagatttatttttataaagtttagtctctccttccaacataataaaagtggaagtcatttgactagataaactatcagtaagttttatagagatagacgaacaattagcgtattgagaagcatttagtgtaacgtattcgatacattttgcattagatttactaatcgattttgcatactctataacacccgcacaagtctgtagagaatcgctagatgcagtaggtcttggtgaagtttcaactctcttcttgattaccttactcatgattaaacctaaataattgtactttgtaatataatgatatatattttcactttatctcatttgagaataaaaatgtttttgtttaaccactgcatgatgtacagatttcggaatcgcaaaccaccagtggttttattttatccttgtccaatgtgaattgaatgggagcggatgcgggtttcgtacgtagatagtacattcccgtttttagaccgagactccatccgtaaaaatgcatactcgttagtttggaataactcggatctgctatatggatattcatagattgactttgatcgatgaaggctcccctgtctgcagccatttttatgatcgtcttttgtggaatttcccaaatagttttataaactcgcttaatatcttctggaaggtttgtattctgaatggatccaccatctgccataatcctattcttgatctcatcattccataattttctctcggttaaaactctaaggagatgcggattaactacttgaaattctccagacaatactctccgagtgtaaatattactggtatacggttccaccgactcattatttcccaaaatttgagcagttgatgcagtcggcataggtgccaccaataaactatttctaagaccgtatgttctgattttatcttttagaggttcccaattccaaagatccgacggtacaacattccaaagatcatattgtagaataccgttactggcgtacgatcctacatatgtatcgtatggtccttccttctcagctagttcacaactcgcctctaatgcaccgtaataaatggtttcgaagatcttcttatttagatcttgtgcttccaggctatcaaatggataatttaagagaataaacgcgtccgctaatccttgaacaccaataccgataggtctatgtctcttattagagatttcagcttctggaataggataataattaatatctataattttattgagatttctgacaattactttgaccacatccttcagtttgagaaaatcaaatcgcccatctattacaaacatgttcaaggcaacagatgccagattacaaacggctacctcattagcatccgcatattgtattatctcagtgcaaagattactacacttgatagttcctaaattttgttgattactctttttgttacacgcatccttataaagaatgaatggagtaccagtttcaatctgagattctataatcgctttccagacgactcgagcctttattatagatttgtatctcctttctctttcgtatagtgtatacaatcgttcgaactcgtctccccaaacattgtccaatccaggacattcatccggacacatcaacgaccactctccgtcatccttcactcgtttcataaagagatcaggaatccaaagagctataaatagatctctggttctatgttcctcgtttcctgtattctttttaagatcgaggaacgccataatatcagaatgccacggttccaagtatatggccataactccaggccgtttgtttcctccctgatctatgtatctagcggtgttattataaactctcaacattggaataataccgtttgatataccattggtaccggagatatagcttccactggcacgaatattactaattgatagacctattccccctgccattttagagattaatgcgcatcgttttaacgtgtcatagataccctctatgctatcatcgatcatgttaagtagaaaacagctagacatttggtgacgactagttcccgcattaaataaggtaggagaagcgtgcgtaaaccatttttcagaaagtagattgtacgtctcaatagctgagtctatatcccattgatgaattcctactgcgacacgcattaacatgtgctgaggtctttcaacgatcttgttgtttattttcaacaagtaggatttttccaaagttttaaaaccaaaatagttgtatgaaaagtctcgttcgtaaataataaccgagttgagtttatccttatatttgttaactatatccatggtgatacttgaaataatcggagaatgtttcccatttttaggattaacatagttgaataaatcctccatcacttcactaaatagtttttttgtttccttgtgtagatttgatacggctattctggcggctagaatggcataatccggatgttgtgtagtacaagtggctgctatttcggctgccagagtgtccaattctaccgttgttactccattatatattccttgaataaccttcatagctattttaataggatctatatgatccgtgtttaagccataacataattttctaatacgagacgtgattttatcaaacatgacattttccttgtatccatttcgtttaatgacaaacatttttgttggtgtaataaaaaaattatttaacttttcattaatagggatttgacgtatgtagcgtacaaaatgatcgttcctggtatatagataaagagtcctatatatttgaaaatcgttacggctcgattaaactttaatgattgcatagtgaatatatcattaggatttaactccttgactatcatggcggcgccagaaattaccatcaaaagcattaatacagttatgccgatcgcagttaaaacggttatagcatccaccatttatatctaaaaattagatcaaagaatatgtgacaaagtcctagttgtatactgagaattgacgaaacaatgtttcttacatatttttttcttattagtaactgacttaatagtaggaactggaaagctagacttgattattctataagtatagatacccttccagataatgttctctttgataaaagttccagaaaatgtagaattttttaaaaagttatcttttgctattaccaagattgtgtttagacgcttattattaatatgagtgatgaaatccacaccgcctctagatatcgcctttatttccacattagatggtaaatccaatagtgaaactatctttttaggaatgtatggactcgcgtttagaggagtgaacgtcttgggcgtcggaaaggatgattcgtcaaacgaataaacaatttcacaaatggatgttaatgtattagtaggaaattttttgacgctagtggaattgaagattctaatggatgatgttctacctatttcatccgataacatgttaatttccgacaccaacggttttaatatttcgatgatatacggtagtctctctttcggacttatatagcttattccacaatacgagtcattatatactccaaaaaacaaaataactagtataaaatctgtatcgaatgggaaaaacgaaattatcgacataggtatagaatccggaacattgaacgtattaatacttaattctttttctgtggtaagtaccgataggttattgacattgtatggttttaaatattctataacttgagacttgatagatattagtgatgaattgaaaattatttttatcaccacgtgtgtttcaggatcatcgtcgacgcccgtcaaccaaccgaatggagtaaaataaatatcattaatatatgctctagatattagtatttttattaatcctttgattatcatcttctcgtaggcgaatgattccatgatcaagagtgatttgagaacatcctccggagtattaatgggcttagtaaacagtccatcgttgcaataataaaagttatccaagttaaaggatattatgcattcgtttaaagatatcacctcatctgacggagacaattttttggtaggttttagagactttgaagctacttgtttaacaaagttattcatcgtcgtctactattctatttaattttgtagttaatttatcacatatcacattaattgactttttggtccatttttccatacgtttatattcttttaatcctgcgttatccgtttccgttatatccagggatagatcttgcaagttaaatagaatgctcttaaataatgtcattttcttatccgctaaaaatttaaagaatgtataaacctttttcagagatttgaaactcttaggtggtgtcctagtacacaatatcataaacaaactaataaacattccacattcagattccaacagctgattaacttccacattaatacagcctattttcgctccaaatgtacattcgaaaaatctgaataaaacatcgatgtcacaatttgtattatccaatacagaatgtttgtgattcgtgttaaaaccatcggagaaggaatagaaataaaaattattatagtggtggaattcagttggaatattgcctccggagtcataaaaggatactaaacattgttttttatcataaattacacatttccaatgagacaaataacaaaatccaaacattacaaatctagaggtagaacttttaattttgtctttaagtatatacgataagatatgtttattcataaacgcgtcaaatttttcatgaatcgctaaggagtttaagaatctcatgtcaaattgtcctatataatccacttcggatccataagcaaactgagagactaagttcttaatacttcgattgctcatccaggctcctctctcaggctctattttcatcttgacgacctttggattttcaccagtatgtattcctttacgtgataaatcatcgattttcaaatccatttgtgagaagtctatcgccttagatactttttcccgtagtcgaggtttaaaaaaatacgctaacggtatactagtaggtaactcaaagacatcatatatagaatggtaacgcgtctttaactcgtcggttaactctttcttttgatcgagttcgtcgctactattgggtctgctcaggtgccccgactctactagttccaacatcataccgataggaatacaagacactttgccggcggttgtagatttatcatatttttccactacatatccgttacaatttgttaaaaatttagatacatctatattgctacataatccagctagtgaatatatatgacataataaattggtaaatcctagttctggtattttactaattactaaatctgtatatctttccatttatcatggaaaagaatttaccagatatcttcttttttccaaactgcgttaatgtattctcttacaaatattcacaagatgaattcagtaatatgagtaaaacggaacgtgatagtttctcattggccgtgtttccagttataaaacatagatggcataacgcacacgttgtaaaacataaaggaatatacaaagttagtacagaagcacgtggaaaaaaagtatctcctccatcactaggaaaacccgcacacataaacctaaccgcgaagcaatatatatacagtgaacacacaataagctttgaatgttatagttttctaaaatgtataacaaatacagaaatcaattcgttcgatgagtatatattaagaggactattagaagctggtaatagtttacagatattttccaattccgtaggtaaacgaacagatactataggtgtactagggaataagtatccatttagcaaaattccattggcctcattaactcctaaagcacaacgagagatattttcagcgtggatttctcatagacctgtagttttaactggaggaactggagtgggtaagacgtcacaggtacccaagttattgctttggtttaattatttatttggtggattctctactctagataaaatcactgactttcacgaaagaccagtcattctatctcttcctaggatagctttagttagattgcatagcaataccattttaaaatcattgggatttaaggtactagatggatctcctatttctttacggtacggatctataccggaagaattaataaacaaacaaccaaaaaaatatggaattgtattttctacccataagttatctctaacaaaactatttagttatggcactcttattatagacgaagttcatgagcatgatcaaataggagatattattatagcagtagcgagaaagcatcatacgaaaatagattctatgtttttaatgactgccacgttagaggatgacagggaacggctaaaagtatttttacctaatcccgcatttatacatattcctggagatacactgtttaaaattagcgaggtatttattcataataagataaatccatcttccagaatggcatacatagaagaagaaaagagaaatttagttactgctatacagatgtatactcctcctgatggatcatccggtatagtctttgtggcatccgttgcacagtgtcacgaatataaatcatatttagaaaaaagattaccgtatgatatgtatattattcatggtaaggtcttagatatagacgaaatattagaaaaagtgtattcatcacctaatgtatcgataattatttctactccttatttggaatccagcgttactatacgcaatgttacacacatttatgatatgggtagagtttttgtccccgctccttttggaggatcgcaacaatttatttctaaatctatgagagatcaacgaaaaggaagagtaggaagagttaatcctggtacatacgtctatttctatgatctgtcttatatgaagtctatacagcgaatagattcagaatttctacataattatatattgtacgctaataagtttaatctaacactccccgaagatttgtttataatccctacaaatttggatattctatggcgtacaaaggaatatatagactcgttcgatattagtacagaaacatggaataaattattatccaattattatatgaagatgatagagtatgctaaactttatgtactaagtcctattctcgctgaggagttggataactttgagaggacgggagaattaactagtattgtacgagaagccattttatctctaaatttacaaattaagattttaaattttaaacataaagatgatgatacgtatatacacttttgtaaaatattattcggtgtctataacggaacaaacgctactatatattatcatagacctctaacgggatatatgaatatgatttcagatactatatttgttcctgtagataataactaaaaattaaactctaatgaccacatctttttttagagatgaaaaattttccacatctccttttgtagacacgactaaacattttgcagaaaaaagtttattagtgtttagataatcgtatacttcatcagtgtagatagtaaatgtgaacagataaaaggtattcttgctcaatagattggtaaattccatagaatatattaatcctttcttcttgagatcccacatcatttcaaccagagacgttttatccaatgatttacctcgtactataccacatacaaaactagattttgcagtgacgtcgtacctggtattcctaccaaacaaaattttacttttagttcttttagaaaattctaaggtagaatctctatttgccaatatgtcatctatggaattaccactagcaaaaaatgatagaaatatatattgatacatcgcagctggttttgatctactatactttaaaaacgaatcagattccataattgcctgtatatcatcagctgaaaaactatgttttacacgtattccttcggcatttctttttaatgatatatcttgtttagacaatgataaagttatcatgtccatgagagacgcgtctccgtatcgtataaatatttcattagatgttagacgcttcattaggggtatacttctataaggtttcttaatcagtccatcattggttgcgtcaagaactactatcggatgttgttgggtatctctagtgttacacatggccttactaaagtttgggtaaataactatgatatctctattaattatagatgcatatatttcattcgtcaaggatattagtatcgacttgctatcgtcattaatacgtgtaatgtaatcatataaatcatgcgatagccaaggaaaatttaaatagatgttcatcatataatcgtcgctataattcatattaatacgttgacattgactaatttgtaatatagcctcgccacgaagaaagctctcgtattcagtttcatcgataaaggataccgttaaatataactggttgccgatagtctcatagtctattaagtggtaagtttcgtacaaatacagaatccctaaaatattatctaatgttggattaatctttaccataactgtataaaatggagacggagtcataactattttaccgtttgtacttactggaatagatgaaggaataatctccggacatgctggtaaagacccaaatgtctgtttgaagaaatccaatgttccaggtcctaatctcttaacaaaaattacgatattcgatcccgatatcctttgcattctatttaccagcatatcacgaactatattaagattatctatcatgtctattctcccaccgttatataaatcgcctccgctaagaaacgttagtatatccatacaatggaatacttcatttctaaaatagtattcgttttctaattctttaatgtgaaatcgtatactagaaagggaaaaattatctttgagttttccgttagaaaagaaccacgaaactaatgttctgattgcgtccgattccgttgctgaattaatggatttacaccaaaaactcatataacttctagatgtagaagcattcgctaaaaaattagtagaatcaaaggatataagtagatgttccaacaagtgagcaattcccaagatttcatctatatcattctcgaatccgaaattagaaattcccaagtagatatcctttttcatccgatcgttgatgaaaatacgaactttattcggtaagacaatcatttactaaggagtaaaataggaagtaatgttcgtatgtcgttatcatcgtataaattaaaggtgtgttttttaccattaagtgacattataattttaccaatattggaattataatataggtgtatttgcgcactcgcgacggttgatgcatcggtaaatatagctgtatctaatgttctagtcggtatttcatcatttcgctgtctaataatagcgttttctctatctgtttccattacagctgcctgaagtttattggtcggataatatgtaaaataataagaaatacatacgaataacaaaaataaaataagatataataaagatgccatttagagatctaattttgtttaacttgtccaaattcctacttacagaagatgaggaatcgttggagatagtgtcttccttatgtagaggatttgaaatatcttataatgacttgataacttactttccagataggaaataccataaatatatttataaagtatttgaacatgtagatttatcggaggaattaagtatggaattccatgatacaactctgagagatttagtctatcttagattgtacaagtattccaagtgtatacggccgtgttataaattaggagataatctaaaaggcatagttgttataaaggacaggaatatttatattagggaagcaaatgatgacttgatagaatatctcctcaaggaatacactcctcagatttatacatattctaatgagcgcgtccccataactggttcaaaattaattctttgtggattttctcaagttacatttatggcgtatacaacgtcgcatataacaacaaataaaaaggtagatgttctcgtttccaaaaaatgtatagatgaactagtcgatccaataaattatcaaatacttcaaaatttatttgataaaggaagcggaacaataaacaaaatactcaggaagatattttattcggtaacaggtggccaaactccataggtagctttttctatttcggattttagaatttccaaattcaccagcgatttatcggttttggtgaaatccaaggatttattaatgtccacaaatgccatttgttttgtctgtggattgtatttgaaaatggaaacgatgtagttagatagatgcgctgcgaagtttcctattagggttccgcgcttcacgtcacccagcatacttgaatcaccatcctttaaaaaaaatgataagatatcaacatggagtatatcatactcggattttaattcttctactgcatcactgacattttcacaaatactacaatacggtttaccgaaaataatcagtacgttcttcatttatgggtatcaaaaacttaaaatcgttactgctggaaaataaatcactgacgatattagatgataatttatacaaagtatacaatggaatatttgtggatacaatgagtatttatatagccgtcgccaattgtgtcagaaacttagaagagttaactacggtattcataaaatacgtaaacggatgggtaaaaaagggagggcatgtaaccctttttatcgatagaggaagtataaaaattaaacaagacgttagagacaagagacgtaaatattctaaattaaccaaggacagaaaaatgttagaattagaaaagtgtacatccgaaatacaaaatgttaccggatttatggaagaagaaataaaggcagaaatgcaattaaaaatcgataaactcacatttcaaatatatttatctgattctgataacataaaaatatcattgaatgagatactaacacatttcaacaataatgagaatgttacattattttattgtgatgaacgagacgcagaattcgttatgtgtctcgaggctaaaacacatttctctaccacaggagaatggccgttgataataagtaccgatcaggatactatgctatttgcatctgctgataatcatcctaagatgataaaaaacttaactcaactgtttaaatttgttccctcggcagaggataactatttagcaaaattaacggcgttagtgaatggatgtgatttctttcctggactctatggggcatctataacacccaccaacttaaacaaaatacaattgtttagtgattttacaatcgataatatagtcactagtttggcaattaaaaattattatagaaagactaactctaccgtagacgtgcgtaatattgttacgtttataaacgattacgctaatttagacgatgtctactcgtatgttcctccttgtcaatgcactgttcaagaatttatattttccgcattagatgaaaaatggaatgaatttaaatcatcttatttagaaagcgttccgttaccctgccaattaatgtacgcgttagaaccacgtaaggagattgatgtttcagaagttaaaactttatcatcttatatagatttcgaaaatactaaatcagatatcgatgttataaaatctatatcctcgatcttcggatattctaacgaaaactgtaacacgatagtattcggcatctataaggataatttactactgagtataaataattcattttactttaacgatagtctgttaataaccaatactaaaagtgataatataataaatataggttactagattaaaaatggtgttccaactcgtgtgctctacgtgcggcaaagatatttctcacgaacgatataaattgattatacgaaaaaaatcattaaaggatgtactcgtcagtgtaaagaacgaatgttgtaggttaaaattatctacacaaatagaacctcaacgtaacttaacagtgcaacctctattggatataaactaatatggatccggttaattttatcaagacatatgcgcctagaggttctattatttttattaattataccatgtcattaacaagtcatttgaatccatcgatagaaaaacatgtgggtatttattatggtacgttattatcggaacacttggtagttgaatctacctatagaaaaggagttcgaatagtcccattggatagtttttttgaaggatatcttagtgcaaaagtatacatgttagagaatattcaagttatgaaaatagcagctgatacgtcattaactttattgggtattccgtatggatttggtcataatagaatgtattgttttaaattggtagctgaatgttataaaaatgccggtattgatacatcgtctaaacgaatattaggtaaagatatttttctgagccaaaacttcacagacgataatagatggataaagatatatgattctaataatttaacattttggcaaattgattaccttaaagggtgagttaatatgcataactactcctccgttgttttttccctcgttctttttcttaacgttgtttgccatcactctcataatgtaaagatattctaaaatggtaaacttttgcatatcggacgcagaaattggtataaatgttgtaattgtattatttcccgtcaatggactagtcacagctccatcagttttatatcctttagagtatttctcactcgtgtctaacattctagagcattccatgatctgtttatcgttgatattggccggaaagatagattttttattttttattatattactattggcaattgtagatataacttctggtaaatatttttctaccttttcaatctcttctattttcaagccggctatatattctgctatattgttgctagtatcaataccttttctggctaagaagtcatatgtggtattcactatatcagttttaactggtagttccattagcctttccacttctgcagaataatcagaaattggttctttaccagaaaatccagctactataataggctcaccgatgatcattggcaaaatcctatattgtaccagattaatgagagcatatttcatttccaataattctgctagttcttgagacattgatttatttgatgaatctagttggttctctagatactctaccatttctgccgcatacaataacttgttagataaaatcagggttatcaaagtgtttagcgtggctagaatagtgggcttgcatgtattaaagaatgcggtagtatgagtaaaccgttttaacgaattatatagtctccagaaatctgtggcgttacatacatgagccgaatgacatcgaagattgtccaatatttttaatagctgctctttgtccattatttctatatttgactcgcaacaattgtagataccattaatcaccgattcctttttcgatgccggacaatagcacaattgtttagctttggactctatgtattcagaattaatagatatatctctcaatacagattgcactatacattttgaaactatgtcaaaaattgtagaacgacgctgttctgcagccatttaactttaaataatttacaaaaatttaaaatgagcatccgtataaaaatcgataaactgcgccaaattgtggcatatttttcagagttcagtgaagaagtgtctataaatgtagactcgacggatgagttaatgtatatttttgccgccttgggcggatctgtaaacatttgggcaattatacctctaagtgcatcagtgttttaccgaggagccgaaaatattgtgtttaatcttcctgtgtccaaggtaaaatcgtgtttgtgtagttttcacaatgatgccatcatagatatagaacctgatctggaaaataatctagtaaaactttctagttatcatgtagtaagtgtcgattgtaacaaggaactgatgcctattaggacagatactactatttgtctaagtatagatcaaaagaaatcttacgtgtttaattttcacaagtatgaagaaaaatgttgtggtagaaccgtcattcatctagaatggttgttgggctttatcaagtgtattagtcagcatcagcatctggctattatgtttaaagatgacaatattattatgaagactcctggtaatactgatgcgttttccagggaatattctatgactgaatgttctcaagaactacaaaagttttctttcaaaatagctatctcgtctctcaacaaactacgaggattcaaaaagagagtcaatgtttttgaaactagaatcgtaatggataatgacgataacattttaggaatgttgttttcggatagagttcaatcctttaagatcaacatctttatggcgtttttagattaatactttcaatgagataaatatgggtggcggagtaagtgttgagctccctaaacgggatccgcctccgggagtacccactgatgagatgttattaaacgtggataaaatgcatgacgtgatagctcccgctaagcttttagaatatgtgcatataggaccactagcaaaagataaagaggataaagtaaagaaaagatatccagagtttagattagtcaacacaggacccggtggtctttcggcattgttaagacaatcgtataatggaaccgcacccaattgctgtcgcacttttaatcgtactcattattggaagaaggatggaaagatatcagataagtatgaagagggtgcagtattagaatcgtgttggccagacgttcacgacactggaaaatgcgatgttgatttattcgactggtgtcagggggatacgttcgatagaaacatatgccatcagtggatcggttcagcctttaataggagtaatagaactgtagagggtcaacaatcgttaataaatctgtataataagatgcaaacattatgtagtaaagatgctagtgtaccaatatgcgaatcatttttgcattatttacgcgcacacaatacagaagatagcaaagagatgatcgattatattctaagacaacagtctgcggactttaaacagaaatatatgagatgtagttatcccactagagataagttagaagagtcattaaaatatgcggaacctcgagaatgttgggatccagagtgttcgaatgccaatgttaatttcttactaacacgtaattataataatttaggactttgcaatattgtacgatgtaataccagcgtgaacaacttacagatggataaaacttcctcattaagattgtcatgtggattaagcaatagtgatagattttctactgttcccgtcaatagagcaaaagtagttcaacataatattaaacactcgttcgacctaaaattgcatttgatcagtttattatctctcttggtaatatggatactaattgtagctatttaaatgggtgccgcggcaagcatacagacgacggtgaatacactcagcgaacgtatctcgtctaaattagaacaagaagcgaacgctagtgctcaaacaaaatgtgatatagaaatcggaaatttttatatccgacaaaaccatggatgtaacctcactgttaaaaatatgtgctctgcggacgcggatgctcagttggatgctgtgttatcagccgctacagaaacatatagtggattaacaccggaacaaaaagcatacgtgccagctatgtttactgctgcgttaaacattcagacgagtgtaaacactgttgttagagattttgaaaattatgtgaaacagacttgtaattctagcgcggtcgtcgataacaaattaaagatacaaaacgtaatcatagatgaatgttacggagccccaggatctccaacaaatttggaatttattaatacaggatctagcaaaggaaattgtgccattaaagcgttgatgcaattgacgactaaggccactactcaaatagcacctagacaagttgctggtacaggagttcagttttatatgattgttatcggtgttataatattggcagcgttgtttatgtactatgccaagcgtatgttgttcacatccaccaatgataaaatcaaacttattttagccaataaggaaaacgtccattggactacttacatggacacattctttagaacttctccgatggttattgctaccacggatatgcaaaactgaaaatatattgataatattttaatagattaacatggaagttatcgctgatcgtctagacgatatagtgaaacaaaatatagcggatgaaaaatttgtagattttgttatacacggtctagagcatcaatgtcctgctatacttcgaccattaattaggttgtttattgatatactattatttgttatagtaatttatatttttacggtacgtctagtaagtagaaattatcaaatgttgttggtggtgctagtcatcacattaactattttttattactttatactataatagtactagactgacttctaacaaacatctcacctgccataaataaatgcttgatattaaagtcttctatttctaacactattccatctgtggaaaataatactctgacattatcgctaattgacacatcggtgagtgatatgcctataaagtaataatcttctttgggcacatataccagtgtaccaggttctaacaacctatttactggtgctcctgtagcatactttttctttaccttgagaatatccatcgtttgcttggtcaatagcgatatgtgattttttatcaaccactcgaaaaagtaattggagtgttcatatcctctacgggctattgtctcatggccgtgtatgaaatttaagtaacacgactgtggtagatttgttctatagagccgattgccgcaaatagatagaactaccaatatgtctgtacaaatgttaaacattaattgattaacagaaaaaacaatgttcgttctgggaatagaaaccagatcaaaacaaaattcgttagaatatatgccacgtttatacatggaatataaaataactacagtttgaaaaataacagtatcatttaaacatttaacttgcggggttaatttcacaactttactgtttttgaactgttcaaaatatagcatcgatccgtgagaaatacgtttagccgcctttaatagaggaaatcccaccgcctttctggatctcaccaacgacgatagttctgaccagcaactcatttcttcatcatccacctgttttaacatataataggcaggagatagatatccgtcattgcaatattccttctcgtaggcacacaatctaatattgataaaatctccattctcttctctgcatttattatcttgtttcggtggctgattaggctgtagtcttggtttaggccttggtctatcgttgttgaatctattttggtcattaaatctttcatttcttcctggtatatttctatcacctcgtttggttggatttttgtctatattatcgtttgtaacatcggtacgggtattcatttatcacaaaaaaaacttctctaaatgagtctactgctagaaaacctcatcgaagaagataccatattttttgcaggaagtatatctgagtatgatgatttacaaatggttattgccggcgcaaaatccaaatttccaagatctatgctttctatttttaatatagtacctagaacgatgtcaaaatatgagttggagttgattcataacgaaaatatcacaggagcaatgtttaccacaatgtataatataagaaacaatttgggtctaggagatgataaactaactattgaagccattgaaaactatttcttggatcctaacaatgaagttatgcctcttattattaataatacggatatgactgccgtcattcctaaaaaaagtggtaggagaaagaataagaacatggttatcttccgtcaaggatcatcacctatcttgtgcattttcgaaactcgtaaaaagattaatatttataaagaaaatatggaatccgcgtcgactgagtatacacctatcggagacaacaaggctttgatatctaaatatgcgggaattaatgtcctgaatgtgtattctccttccacatccataagattgaatgccatttacggattcaccaataaaaataaactagagaaacttagtactaataaggaactagaatcgtatagttctagccctcttcaagaacccattaggttaaatgattttctgggactattggaatgtgttaaaaagaatattcctctaacagatattccgacaaaggattgattactataaatggagaatgttcctaatgtatactttaatcctgtgtttatagagcccacgtttaaacattctttattaagtgtttataaacacagattaatagttttatttgaagtattcgttgtattcattctaatatatgtattttttagatctgaattaaatatgttctttatgcctaaacgaaaaatacccgatcctattgatagattacgacgtgctaatctagcgtgtgaagacgataaattaatgatctatggattaccatggatgacaactcaaacatctgcgttatcaataaatagtaaaccgatagtgtataaagattgtgcaaagcttttgcgatcaataaatggatcacaaccagtatctcttaacgatgttcttcgcagatgatgattcattttttaagtatttggctagtcaagatgatgaatcttcattatctgatatattgcaaatcactcaatatctagactttctgttattattattgatccaatcaaaaaataaattagaagctgtgggtcattgttatgaatctctttcagaggaatacagacaattgacaaaattcacagactttcaagattttaaaaaactgtttaacaaggtccctattgttacagatggaagggtcaaacttaataaaggatatttgttcgactttgtgattagtttgatgcgattcaaaaaagaatcctctctagctaccaccgcaatagatcctgttagatacatagatcctcgtcgtgatatcgcattttctaacgtgatggatatattaaagtcgaataaagtgaacaataattaattctttattgtcatcatgaacggcggacatattcagttgataatcggccccatgttttcaggtaaaagtacagaattaattagacgagttagacgttatcaaatagctcaatataaatgcgtgactataaaatattctaacgataatagatacggaacgggactatggacgcatgataagaataattttgaagcattggaagcaactaaactatgtgatgtcttggaatcaattacagatttctccgtgataggtatcgatgaaggacagttctttccagacattgtttaattctgtgagcgtatggcaaacgaaggaaaaatagttatagtagccgcactcgatgggacatttcaacgtaaaccgtttaataatattttgaatcttattccattatctgaaatggtggtaaaactaactgctgtgtgtatgaaatgctttaaggaggcttccttttctaaacgattgggtgaggaaaccgagatagagataataggaggtaatgatatgtatcaatcggtgtgtagaaagtgttacatcgactcataatattatattttttatctaaaaaactaaaaataaacattgattaaattttaatataatacttaaaaatggatgttgtgtcgttagataaaccgtttatgtattttgaggaaattgataatgagttagattacgaaccagaaagtgcaaatgaggtcgcaaaaaaactgccgtatcaaggacagttaaaactattactaggagaattattttttcttagtaagttacagcgacacggtatattagatggtgccaccgtagtgtatataggatctgctcccggtacacatatacgttatttgagagatcatttctataatttaggagtgatcatcaaatggatgctaattgacggccgccatcatgatcctattttaaatggattgcgtgatgtaactctagtgactcggttcgttgatgaggaatatctacgatccatcaaaaaacaactgcatccttctaagattattttaatttctgatgtaagatccaaacgaggaggaaatgaacctagtacggcggatttactaagtaattacgctctacaaaatgtcatgattagtattttaaaccccgtggcatctagtcttaaatggagatgcccgtttccagatcaatggatcaaggacttttatatcccacacggtaataaaatgttacaaccttttgctccttcatattcagctgaaatgagattattaagtatttataccggtgagaacatgagactgactcgagttaccaaattagacgctgtaaattatgaaaaaaagatgtactaccttaataagatcgtccgtaacaaagtagttgttaactttgattatcctaatcaggaatatgactattttcacatgtactttatgctgaggaccgtgtactgcaataaaacatttcctactactaaagcaaaggtactatttctacaacaatctatatttcgtttcttaaatattccaacaacatcaactgaaaaagttagtcatgaaccaatacaacgtaaaatatctagcaaaaattctatgtctaaaaacagaaatagcaagagatccgtacgcggtaataaatagaaacgtactactgagatatactaccgatatagagtataatgatttagttactttaataaccgttagacataaaattgattctatgaaaactgtgtttcaggtatttaacgaatcatccataaattatactccggttgatgatgattatggagaaccaatcattataacatcgtatcttcaaaaaggtcataacaagtttcctgtaaattttctatacatagatgtggtaatatctgacttatttcctagctttgttagactagatactacagaaactaatatagttaatagtgtactacaaacaggcgatggtaaaaagactcttcgtcttcccaaaatgttagagacggaaatagttgtcaagattctctatcgccctaatataccattaaaaattgttagatttttccgcaataacatggtaactggagtagagatagccgatagatctgttatttcagtcgctgattaatcaattagtagagatgagataagaacattataataattaataatattatcttatatcttatcttatatcttatatcttgtttagaaaaatgctaatattaaaatagctaacgctagtaatccaatcggaagccatttgatatctataatagggtatctaatttcctgatttaaatagcggacagctatattctcggtagctactcgtttggaatcacaaacattatttacatctaatttactatctgtaatggaaacgtttcccaatgaaatggtacaatccgatacattgcattttgttatatttttttttaaagaggctggtaacaacgcatcgcttcgtttacatggctcgtaccaacaataatagggtaatcttgtatctattcctatccgtactatgcttttatcaggataaatacatttacatcgtatatcgtctttgttagcatcacagaatgcataaatttgttcgtccgtcatgataaaaatttaaagtgtaaatataactattatttttatagttgtaataaaaagggaaatttgattgtatactttcggttctttaaaagaaactgacttgataaaaatggctgtaatctctaaggttacgtatagtctatatgatcaaaaagagattaatgctacagatattatcattagtcatgttaaaaatgacgacgatatcggtaccgttaaagatggtagactaggtgctatggatggggcattatgtaaaacttgtgggaaaacggaattggaatgtttcggtcactggggtaaagtaagtatttataaaactcatatagttaagcctgaatttatttcagaaattattcgtttactgaatcatatatgtattcactgcggattattgcgttcacgagaaccgtattccgacgatattaacctaaaagagttatcgggacacgctcttaggagattaaaggataaaatattatccaagaaaaagtcatgttggaacagcgaatgtatgcaaccgtatcaaaaaattactttttcaaagaaaaaggtttgtttcgtcaacaagttggatgatattaacgttcctaattctctcatctatcaaaagttaatttctattcatgaaaagttttggccattattagaaattcatcaatatccagctaacttattttatacagactactttcccatccctccgctgattattagaccggctattagtttttggatagatagtatacccaaagaaaccaatgaattaacttacttattaggtatgatcgttaagaattgtaacttgaatgctgatgaacaggttatccagaaggcggtaatagaatacgatgatattaaaattatttctaataacactaccagtatcaatttatcatatattacatccggcaaaaataatatgattagaagttatatcgtcgcccgacgaaaagatcagaccgctagatctgtaattggtcccagtacatctatcaccgttaatgaggtaggaatgcccgcatatattagaaatacacttacagaaaagatatttgttaatgcctttacagtggataaagttaaacaactattagcgtcaaaccaagttaaattttactttaataaacgattaaaccaattaacaagaatacgccaaggaaagtttattaaaaataaaatacatttattgcctggtgattgggtagaagtagctgttcaagaatatacaagtattatttttggaagacagccgtctctacatagatacaacgtcatcgcttcatctatcagagctaccgaaggagatactatcaaaatatctcccggaattgccaactctcaaaatgctgatttcgacggggatgaggaatggatgatattagaacaaaatcctaaagctgtaattgaacaaagtattcttatgtatccgacgacgttactcaaacacgatattcatggagcccccgtttatggatctattcaagatgaaatcgtagcagcgtattcattgtttaggatacaagatctttgtttagatgaagtattgaacatcttggggaaatatggaagagagttcgatcctaaaggtaaatgtaaattcagcggtaaagatatctatacttacttgataggtgaaaagattaattatccgggtctcttaaaggatggtgaaattattgcaaacgacgtagatagtaattttgttgtggctatgaggcatctgtcattggctggactcttatccgatcataagtcgaacgtggaaggtatcaactttattatcaagtcatcttatgtttttaagagatatctatctatttacggttttggggtgacattcaaagatctgagaccaaattcgacgttcactaataaattggaggccatcaacgtagaaaaaatagaacttatcaaagaagcatacgccaaatatctcaacgatgtaagagacgggaaaatagttccattatctaaagctttagaggcggactatgtggaatccatgttatccaacttgacaaatcttaatatccgagagatagaagaacatatgagacaaacgctgatagataatccagataataacctcctgaaaatggccaaagcgggttataaagtaaatcccacagaactaatgtatattctaggtacgtatggacaacaaaggattgatggtgaaccagcagagactcgagtattgggtagagttttaccttactatcttccagactctaaggatccagaaggaagaggttatattcttaattctttaacaaaaggattaacgggttctcaatattacttttcgatgctggttgcaagatctcaatctactgatatcgtctgtgaaacatcacgtaccggaacactggctagaaaaatcattaaaaagatggaggatatggtggtcgacggatacggacaagtagttataggtaatacgctcatcaagtacgccgccaattataccaaaattctaggctcagtatgtaaacctgtagatcttatctatccagatgagtccatgacttggtatttggaaattagtgctctgtggaataaaataaaacagggattcgtttactctcagaaacagaaacttgcaaagaagacattggcgccgtttaatttcctagtattcgtcaaacccaccactgaggataatgctattaaggttaaggatctgtacgatatgattcataacgtcattgatgatgtgagagagaaatacttctttacggtatctaatatagattttatggagtatatattcttgacgcatcttaatccttctagaattagaattacaaaagaaacggctatcactatctttgaaaagttctatgaaaaactcaattatactctaggtggtggaactcctattggaattatttctgcacaggtattgtctgagaagtttacacaacaagccctgtccagttttcacactactgaaaaaagtggtgccgtcaaacaaaaacttggtttcaacgagtttaataacttgactaatttgagtaagaataagaccgaaattatcactctggtatccgatgatatctctaaacttcaatctgttaagattaatttcgaatttgtatgtttgggagaattaaatccagacatcactcttcgaaaagaaacagataggtatgtagtagatataatagtcaatagattatacatcaagagagcagaaataaccgaattagtcgtcgaatatatgattgaacgatttatctcctttagcgtcattgtaaaggaatggggtatggagacattcattgaggacgaggataatattagatttactgtctatctaaatttcgttgaaccggaagaattgaatcttagtaagtttataatggttcttccgggggcagccaacaagggcaagattagtaaattcaagattcctatctctgactatacgggttatgacgacttcaatcaaacaaaaaagctcaataagatgactgtagaactcatgaatctaaaagaattgggttctttcgatttggaaaacgtcaacgtgtatcctggagtatggaatacatacgatatcttcggtatcgaggccgctcgtgaatacttgtgcgaagccatgttaaacacctatggagaagggttcgattatctgtatcagccttgtgatcttctcgctagtttactatgtgctagttacgaaccagaatcagtgaataaattcaagttcggcgcagctagtactcttaagagagctacgttcggagacaataaagcattgttaaacgcggctcttcataaaaagtcagaacctattaacgataatagtagctgccacttttttagcaaggtccctaatataggaactggatattacaaatactttatcgacttgggtcttctcatgagaatggaaaggaaactatctgataagatatcttctcaaaagatcaaggaaatggaagaaacagaagacttttaattcttatcaataacatatttttctatgatctgtcttttaaacgatggattttccacaaatgcgcctctcaagtccctcatagaatgatacacgtataaaaaatatagcataggcaatgactccttatttttagacattagatatgccaaaatcatagccccgcttctatttactcccgcagcacaatgaaccaacacgggctcgtttcgttgatcacatttagataaaaaggcggttacgtcgtcaaaatatttactaatatcggtagttgtatcatctaccaacggtatatgaataatattaatattagagttaggtaatgtatatttatccatcgtcaaatttaaaacatatttgaacttaacttcagatgatggtgcatccatagcatttttataatttcccaaatacacattattggttacccttgtcattatagtgggagatttggctctgtgcatatctccagttgaacgtagtagtaagtatttatacaaacttttcttatccatttataacgtacaaatggataaaactactttatcggtaaacgcgtgtaatttagaatacgttagagaaaaggctatagtaggcgtacaagcagccaaaacatcaacacttatattctttgttattatattggcaattagtgcgctattactctggtttcagacgtctgataatccagtctttaatgaattaacgagatatatgcgaattaaaaatacggttaacgattggaaatcattaacggatagcaaaacaaaattagaaagtgatagaggtagacttctagccgctggtaaggatgatatattcgacttcaaatgtgtggatttcggcgcctattttatagctatgcgattggataagaaaacatatctgccgcaagctattaggcgaggtactggagacgcgtggatggttaaaaaggcggcaaaggtcgatccatctgctcaacaattttgtcagtatttgataaaacacaagtctaataatgttattacttgtggtaatgagatgttaaatgaattaggttatagcggttattttatgtcaccgcattggtgttccgattttagtaatatggaatagtgttagataaatgcggtaacgaatgttcctgtaaggaaccataacagcttagatttaacgttaaagatgagcataaacataataaacaaaattacaatcaaacttataacattaatatcaaacaatccaaaaaatgaaatcagtggagtagtaaacgcgtacataactcctggataacgtttagcagctgccgttcctattctagaccaaaaatttggtttcatgttttcgaaacggtattctgcaacaagtcggggatcgtgttctacatatttggcggcattatccagtatctgcctattgatcttcatttcgttttcgattctggctatttcaaaataaaatcccgatgatagacctccagactttataatttcatctacgatgttcagcgccgtagtaactctaataatataggctgataagctaacatcataccctcctgtatatgtgaatatggcatgatttttgtccattacaagctcggttttaactttattgcctgtaataatttctctcatctgtaggatatctatttttttgtcatgcattgccttcaagacgggacgaagaaacgtaatatcctcaataacgttatcgttttctacaataactacatattctacctttttattttctaactcggtaaaaaaattagaatcccatagggctaaatgtctagcgatatttcttttcgtttcttctgtacacatagtgttacaaaaccctgaaaagaagtgagtatacttgtcatcatttctaatgtttcctccagtccactgtataaacgcataatccttgtaatgatctggatcatccttgactaccacaacatttcttttttctggcataacttcgttgtcctttacatcatcgaacttctgatcattaatatgctcatgaacattaggaaatgtttctgatggaggtctatcaataactggcacaacaataacaggagttttcaccgccgccatttagttattgaaattaatcatatacaactctttaatacgagttatattttcgtctatccattgtttcacattgacatatttcgacaaaaagatataaaatgcgtattccaatgcttctctgtttaatgaattactaaaatatacaaacacgtcactgtctggcaataaatgatatcttagaatattgtaacaatttattttgtattgcacatgttcgtgatctatgagttcttcttcgaatggcataggatctccgaatctgaaaacgtataaataggagttagaataataatatttgagagtattggtaatatataaactctttagcggtataattagtttttttctctcaatttctatttttagatgtgatggaaaaatgactaattttgtagcattagtatcatgaactctaatcaaaatcttaatatcttcgtcacacgttagctctttgaagtttttaagagatgcatcagttggttctacagatggagtaggtgcaacaattttttgttctacacatgtatgtactggagccattgttttaactataatggtgcttgtatcgaaaaactttaatgcagatagcggaagctcttcgccgcgactttctacatcgtaattgggttctaacgccgatctctgaatggatactagttttctaagttctaatgtgattctctgaaaatgtaaatccaattcctccggcattatagatgtgtatacatcggtaaataaaactatagtatccaacgatcccttctcgcaaattctagtcttaaccaaaaaatcgtatataaccacggagatggcgtatttaagagtggattcttctaccgttttgttcttggatgtcatataagaaactataaagtccgcactactgttaagaatgattactaacgcaactatatagttcaaattaagcattttggaaacataaaataactctgtagacgatacttgactttcgaataagtttgcagacaaacgaagaaagaacagacctctcttaatttcagaagaaaactttttttcgtattcctgacgtctagagtttatatcaataagaaagttaagaattagtcggttaatgttgtatttcattacccaagtttgagatttcataatattatcaaaagacatgataatattaaagataaagcgctgactatgaacgaaatagctatatggttcgctcaaaaatatagtcttgttaaacgtggaaacgataactgtatttttaatcacgtcagcggcatctaaattaaatataggtatatttattccacacactctacaatatgccacaccatcttcataataaataaattcgttagcaaaattattaattttagtgaaatagttagcgtcaactttcatagcttccttcaatctaatttgatgctcacacggtgcgaattccactctaacatcccttttccatgcctcaggttcatcgatctctataatatctagttttttgcgtttcacaaacacaggctcgtctctcgcgatgagatctgtatagtaactatgtaaatgataactagatagaaagatgtagctatatagatgacgatcctttaagagaggtataataactttaccccaatcagatagactgttgttatggtcttcggaaaaagaatttttataaatttttccagtattttccaaatatacgtacttaacatctaaaaaatccttaatgataataggaatggataatccgtctattttataaagaaatacatatcgcacattatacttttttttggaaatgggaataccgatgtgtctacataaatatgcaaagtctaaatattttttagagaatcttagttggtccaaattcttttccaagtacggtaatagatttttcatattgaacggtatcttcttaatctctggttctagttccgcattaaatgatgaaactaagtcactatttttataactaacgattacatcacctctaacatcatcatttaccagaatactgatcttcttttgtcgtaaatacatgtctaatgtgttaaaaaaaagatcatacaagttatacgtcatttcatctgtggtattcttgtcattgaaggataaactcgtactaatctcttctttaacagcctgttcaaatttatatcctatatacgaaaaaatagcaaccagtgtttgatcatccgcgtcaatattctgttctatcgtagtgtataacaatcgtatatcttcttctgtgatagtcgatacgttataaaggttgataacgaaaatatttttatttcgtgaaataaagtcatcgtaggattttggacttatattcgcgtctagtaaatatgcttttatttttggaatgatctcaattagaatagtctctttagagtccatttaaagttacaaacaactaggaaattggtttatgatgtataatttttttagtttttatagattctttattctatacttaaaaaatgaaaataaatacaaaggttcttgagggttgtgttaaattgaaagcgagaaataatcataaattatttcattatcgcgatatccgttaagtttgtatcgtaatggcgtggtcaattacaaataaagcggatactagtagcttcacaaagatggctgaaatcagagctcatctaaaaaatagcgctgaaaataaagataaaaacgaggatattttcccggaagatgtaataattccatctactaagcccaaaaccaaacgagccactactcctcgtaaaccagcggctactaaaagatcaaccaaaaaggaggaagtggaagaagaagtagttatagaggaatatcatcaaacaactgaaaaaaattctccatctcctggagtcagcgacattgtagaaagcgtggctgctgtagagctcgatgatagcgacggggatgatgaacctatggtacaagttgaagctggtaaagtaaatcatagtgctagaagcgatctttctgacctaaaggtggctaccgacaatatcgttaaagatcttaagaaaattattactagaatctctgcagtatcgactgttctagaggatgttcaagcagctggtatctctagacaatttacttctatgactaaagctattacaacactatctgatctagtcaccgagggaaaatctaaagttgttcgtaaaaaagttaaaacttgtaagaagtaaatgcgtgcacttttttataaagatggtaaactctttaccgataataattttttaaatcctgtatcagacgataatccagcgtatgaggttttgcaacatgttaaaattcctactcatttaacagatgtagtagtatatgaacaaacgtgggaggaggcgttaactagattaatttttgtgggaagcgattcaaaaggacgtagacaatacttttacggaaaaatgcatgtacagaatcgcaacgctaaaagagatcgtatttttgttagagtatataacgttatgaaacgaattaattgttttataaacaaaaatataaagaaatcgtccacagattccaattatcagttggcggtttttatgttaatggaaactatgttttttattagatttggtaaaatgaaatatcttaaggagaatgaaacagtagggttattaacactaaaaaataaacacatagaaataagtcccgatgaaatagttatcaagtttgtaggaaaggacaaagtttcacatgaatttgttgttcataagtctaatagactatataaaccgctattgaaactgacggatgattctagtcccgaagaatttctgttcaacaaactaagtgaacgaaaggtatacgaatgtatcaaacagtttggtattagaatcaaggatctccgaacgtatggagtcaattatacgtttttatataatttttggacaaatgtaaagtccatatctcctcttccatcaccaaaaaagttaatagcgttaactatcaaacaaactgctgaagtggtaggtcatactccatcaatttcaaaaagagcttacatggcaacgactattttagaaatggtaaaggataaaaattttttagatgtagtatctaaaactacgttcgatgaattcctatctatagtcgtagatcacgttaaatcatctacggatggatgatatagatctttacacaaataattacaagaccgataaatggaaatggataagcgtatgaaatctctcgcaatgacagctttcttcggagagctaaacacattagatattatggcattgataatgtctatatttaaacgccatccaaacaataccattttttcagtggataaggatggtcagtttatgattgatttcgaatacgataattataaggcttctcaatatttggatctgaccctcactccgatatttggagatgaatgcaagactcacgcatcgagtatagccgaacaattggcgtgtgcggatattattaaagaggatattagcgaatatatcaaaactactccccgtcttaaacgatttataaaaaaataccgcaatagatcagatactcgtatcagtcgagatacagaaaagcttaaaatagctctagctaaaggcatagattacgaatatataaaagacgcttgttaataagtaaatgaaaaaaaactagtcgtttataataaaacacgatatggatgccaacgtagtatcatcttctactattgcaacgtatatagacgctttagcgaagaatgcttcagaattagaacagaggtctaccgcatacgaaataaataatgaattggaactagtatttattaagccgccattgattactttgacaaatgtagtgaatatctctacgattcaggaatcgtttattcgatttaccgttactaataaggaaggtgttaaaattagaactaagattccattatctaaggtacatggtctagatgtaaaaaatgtacagttagtagatgctatagataacatagtttgggaaaagaaatcattagtgacggaaaatcgtcttcacaaagaatgcttgttgagactatcgacagaggaacgtcatatatttttggattacaagaaatatggatcctctatccgactagaattagtcaatcttattcaagcaaaaacaaaaaactttacgatagactttaagctaaaatattttctaggatccggtgcccaatctaaaagttctttgttgcacgctattaatcatccaaagtcaaggcctaatacatctctggaaatagaattcacacctagagacaatgaaacagttccatatgatgaactaataaaggaattgacgactctatcacgtcatatatttatggcttctccagagaatgtaattctttctccgcctattaacgcgcctataaaaacctttatgttgcctaaacaagatatagtaggtctggatctggaaaatctatatgccgtaactaagactgacggcattcctataactatcagagttacatcaaacgggttgtattgttattttacacatcttggttatattattagatatcctgttaagagaataatagattccgaagtagtagtctttggtgaggcagttaaggataagaactggaccgtatatctcattaagctaatagagcccgtgaatgcaatcaatgatagactagaagaaagtaagtatgttgaatctaaactagtggatatttgtgatcggatagtattcaagtcaaagaaatacgaaggtccgtttactacaactagtgaagtcgtcgatatgttatctacatatttaccaaagcaaccagaaggtgttattctgttctattcaaagggacctaaatctaacattgattttaaaattaaaaaggaaaatactatagaccaaactgcaaatgtagtatttaggtacatgtccagtgaaccaattatctttggagaatcgtctatctttgtagagtataagaaatttagcaacgataaaggctttcctaaagaatatggttctggtaagattgtgttatataacggcgttaattatctaaataatatctattgtttggaatatattaatacacataatgaagtgggtattaagtccgtggttgtacctattaagtttatagcagaattcttagttaatggagaaatacttaaacctagaattgataaaaccatgaaatatattaactcagaagattattatggaaatcaacataatatcatagtcgaacatttaagagatcaaagcatcaaaataggagatatctttaacgaggataaactatcggatgtgggacatcaatacgccaataatgataaatttagattaaatccagaagttagttattttacgaataaacgaactagaggaccgttgggaattttatcaaactacgtcaagactcttcttatttctatgtattgttccaaaacatttttagacgattccaacaaacgaaaggtattggcgattgattttggaaacggtgctgacctggaaaaatacttttatggagagattgcgttattggtagcgacggatccggatgctgatgctatagctagaggaaatgaaagatacaacaaattaaactctggaattaaaaccaagtactacaaatttgactacattcaggaaactattcgatccgatacatttgtctctagtgtcagagaagtattctattttggaaagtttaatatcatcgactggcagtttgctatccattattcttttcatccgagacattatgctaccgtcatgaataacttatccgaactaactgcttctggaggcaaggtattaatcactaccatggacggagacaaattatcaaaattaacagataaaaagacttttataattcataagaatttacctagtagcgaaaactatatgtctgtagaaaaaatagctgatgatagaatagtggtatataatccatcaacaatgtctactccaatgactgaatacattatcaaaaagaacgatatagtcagagtgtttaacgaatacggatttgttcttgtagataacgttgatttcgctacaattatagaacgaagtaaaaagtttattaatggcgcatctacaatggaagatagaccgtctacaaaaaactttttcgaactaaatagaggagccattaaatgtgaaggtttagatgtcgaagacttacttagttactatgttgtttatgtcttttctaagcggtaaataataatatggtatgggttctgatatccccgttctaaatgcattaaataattccaatagagcgatttttgttcctataggaccttccaactgtggatactctgtattgttaatagatatattaatacttttgtcgggtaacagaggttctacgtcttctaaaaataaaagttttataacatctggcctgttcataaataaaaacttggcgattctatatatactcttattatcaaatctagccattgtcttatagatgtgagctactgtaggtgtaccatttgattttctttctaatactatatatttctctcgaagaagttcttgcacatcatctgggaataaaatactactgttgagtaaatcagttattttttttatatcgatattgatggacatttttatagttaaggataataagtatcccaaagtcgataacgacgataacgaagtatttatacttttaggaaatcacaatgactttatcagattaaaattaacaaaattaaaggagcatgtatttttttctgaatatattgtgactccagatacatatggatctttatgcgtcgaattaaatgggtctagttttcagcacggtggtagatatatagaggtggaggaatttatagatgctggaagacaagttagatggtgttctacatccaatcatatatctaaagatatacccgaagatatgcacactgataaatttgtcatttatgatatatacacttttgacgctttcaagaataaacgattggtattcgtacaggtacctccgtcgttaggagatgatagtcatttgactaatccgttattgtctccgtattatcgtaattcagtagccagacaaatggtcaataatatgatttttaatcaagattcatttttaaaatatttattagaacatctgattagaagccactatagagtttctaaacatataacaatagttagatacaaggataccgaagaattaaatctaacgagaatatgttataatagagataagtttaaggcgtttgtattcgcttggtttaacggcgtttcggaaaatgaaaaggtactagatacgtataaaaaggtatctaatttgatataatgaattcagtgactgtatcacacgcgccatatactattacttatcacgatgattgggaaccagtaatgagtcaattggtagagttttataacgaagtagccagttggctgctacgagacgagacgtcgcctattcctgataagttctttatacagttgaaacaaccgcttagaaataaacgagtatgtgtgtgcggtatagatccgtatccgaaagatggaactggtgtaccgttcgaatcaccaaattttacaaaaaaatcaattaaggagatagcttcatctatatctagattaaccggagtaattgattataaaggttataaccttaatataatagacggggttataccctggaattattacttaagttgtaaattaggagaaacaaaaagtcacgcgatctactgggataagatttccaagttactgctgcagcatataactaaacacgttagtgttctttattgtttgggtaaaacagatttctcgaatatacgggcaaagttagaatccccggtaactaccatagtcggatatcatccagcggctagagaccgccaattcgagaaagatagatcatttgaaattatcaacgttttactggaattagacaacaaggcacctataaattgggctcaagggtttatttattaatgctttagtgaaattttaacttgtgttctaaatggatgcggctattagaggtaatgatgttatctttgttcttaagactataggtgtcccgtcagcgtgcagacaaaatgaagatccaagatttgtagaagcatttaaatgcgacgagttagaaagatatattgagaataatccagaatgtacactattcgaaagtcttagggatgaggaagcatactctatagtcagaattttcatggatgtagatttagacgcgtgtctagacgaaatagattatttaacggctattcaagattttattatcgaggtgtcaaactgtgtagctagattcgcgtttacagaatgcggtgccattcatgaaaatgtaataaaatccatgagatctaatttttcattgactaagtctacaaatagagataaaacaagttttcatattatctttttagacacgtataccactatggatacattgatagctatgaaacgaacactattagaattaagtagatcatctgaaaatccactaacaagatcgatagacactgccgtatataggagaaaaacaactcttcgggttgtaggtactaggaaaaatccaaattgcgacactattcatgtaatgcaaccaccgcatgataatatagaagattacctattcacttacgtggatatgaacaacaatagttattacttttctctacaacaacgattggaggatttagttcctgataagttatgggaaccagggtttatttcattcgaagacgctataaaaagagtttcaaaaatattcattaattctataataaactttaatgatctcgatgaaaataattttacaacggtaccactggtcatagattacgtaacaccttgtgcattatgtaaaaaacgatcgcataaacatccgcatcaactatcgttggaaaatggtgctattagaatttacaaaactggtaatccacatagttgtaaagttaaaattgttccgttggatggtaataaactgtttaatattgcacaaagaattttagacactaactctgttttattaaccgaacgaggagaccatatagtttggattaataattcatggaaatttaacagcgaagaacccttgataacaaaactaattttgtcaataagacatcaactacctaaggaatattcaagcgaattactctgtccgaggaaacgaaagactgtagaagctaacatacgagacatgttagtagattcagtggagaccgatacctatccggataaacttccgtttaaaaatggtgtattggacctggtagacggaatgttttactctggagatgatgctaaaaaatatacgtgtactgtatcaaccggatttaaatttgacgatacaaagttcgtcgaagacagtccagaaatggaagagttaatgaatatcattaacgatatccaaccattaacggatgaaaataagaaaaatagagagctatatgaaaaaacattatctagttgtttatgcggtgctaccaaaggatgtttaacattcttttttggagaaactgcaactggaaagtcgacaaccaaacgtttgttaaagtctgctatcggtgacctgtttgttgagacgggtcaaacaattttaacagatgtattggataaaggacctaatccatttatcgctaacatgcatttgaaaagatctgtattctgtagcgaactacctgattttgcatgtagtgggtcaaagaaaatcagatctgataatattaaaaagttgacagaaccttgtgtcattggaagaccgtgtttctccaataaaattaataatagaaaccatgcgacaatcattatcgatactaattacaaacctgtttttgataggatagataacgcattaatgagaagaattgccgtcgtgcgattcagaacacacttttctcaaccttctggtagagaggctgctgaaaataatgacgcgtacgataaagtcaaactattagacgaggggttagatggtaaaatacaaaataatagatatagattcgcatttctatacttgttggtgaaatggtacaaaaaatatcatgttcctattatgaaactatatcctacaccggaagagattcctgactttgcattctatctcaaaataggtactctgttagtatctagctctgtaaagcatattccattaatgacggacctctccaaaaagggatatatattgtacgataatgtggttactcttccgttgactactttccaacagaaaatatccaagtattttaattctagactatttggacacgatatagagagcttcatcaatagacataagaaatttgccaatgttagtgatgaatatctgcaatatatattcatagaggatatttcatctccgtaaatatatgctcatatatttatagaagatatcacatatctaaatgaataccggaatcatagatttatttgataatcatgttgatagtataccaactatattacctcatcagttagctactctagattatctagttagaactatcatagatgagaacagaagcgtgttattgttccatattatgggatcaggtaaaacaataatcgctttgttgttcgccttggtagcttccagatttaaaaaggtttacattctagtgccgaacatcaacatcttaaaaattttcaattataatatgggtgtagctatgaacttgtttaatgacgaattcatagctgagaatatctttattcattccacaacaagtttttattctcttaattataacgataacgtcattaattataacggattatctcgctacaataactctatttttatcgttgatgaggcacataatatctttgggaataatactggagaacttatgaccgtgataaaaaataaaaacaagattccttttctactattgtctggatctcccattactaacacacctaatactctgggtcatattatagatttaatgtccgaagagacgatagattttggtgaaattattagtcgtggtaagaaagtaattcagacacttcttaacgaacgaggtgtgaatgtacttaaggatttgcttaaaggaagaatatcatattacgaaatgcctgataaagatctaccaacgataagatatcacggacgtaagtttctagatactagagtagtatattgtcacatgtctaaacttcaagagagagattatatgattactagacgacagctatgttatcatgaaatgtttgataaaaatatgtataacgtgtcaatggcagtattgggacaacttaatctgatgaataatttagatactttatttcaggaacaggataaggaattgtacccaaatctgaaaataaataatggcgtgttatacggagaagaattggtaacgttaaacattagttccaaatttaaatactttattaatcggatacagacactcaacggaaaacattttatatacttttctaattctacatatggcggattggtaattaaatatatcatgctcagtaatggatattctgaatataatggttctcagggaactaatccacatatgataaacggcaaaccaaaaacatttgctatcgttactagtaaaatgaaatcgtctttagaggatctattagatgtgtataattctcctgaaaacgatgatggtagtcaattgatgtttttgttttcatcaaacattatgtccgaatcctatactctaaaagaggtaaggcatatttggtttatgactatcccagatactttttctcaatacaaccaaattcttggacgatctattagaaaattctcttacgccgatatttctgaaccagttaatgtatatcttttagccgccgtatattccgatttcaatgacgaagtgacgtcattaaacgattacacacaggatgaattaattaatgttttaccatttgacatcaaaaagctgttgtatctaaaatttaagacgaaagaaacgaatagaatatactctattcttcaagagatgtctgaaacgtattctcttccaccacatccatcaattgtaaaagttttattgggagaattggtcagacaatttttttataataattctcgtattaagtataacgataccaagttacttaaaatggttacatcagttataaaaaataaagaagacgctaggaattacatagatgatattgtaaacggtcacttctttgtatcgaataaagtatttgataaatctcttttatacaaatacgaaaacgatattattacagtaccgtttagactttcctacgaaccatttgtttggggagttaactttcgtaaagaatataacgtggtatcttctccataaaactgatgagatatataaagaaataaatgtcgagctttgttaccaatggatacctttccgttacattggaaccacacgagctgacgttagacataaaaactaatattaggaatgccgtatataagacgtatctccatagagaaattagtggtaaaatggccaagaaaatagaaattcgtgaagacgtggaattacctctcggcgaaatagttaataattctgtagttataaacgttccgtgtgtaataacctacgcgtattatcacgttggggatatagtcagaggaacattaaacatcgaagatgaatcaaatgtaactattcaatgtggagatttaatctgtaaactaagtagagattcgggtactgtatcatttagcgattcaaagtactgcttttttcgaaatggtaatgcgtatgacaatggcagcgaagtcactgccgttctaatggaggctcaacaaggtatcgaatctagttttgtttttctcgcgaatatcgtcgactcataaaaaagagaatagcggtaagtataaacacgaatactatggcaataattgcgaatgttttattctcttcgatatatttttgataatatgaaaaacatgtctctctcaaatcggacaaccatctcataaaatagttctcgcgcgctggagaggtagttgccgctcgtataatctctccagaataatatacttgcgtgtcgtcgttcaatttatacggatttctatagttctctgttatataatgcggtttgccctcatgattagacgacgacaatagtgttctaaatttagatagttgatcagaatgaatgtttattggcgttggaaaaattatccatgcagcgtctgcagagtggttgatagttgttcctagatatgtaaaataatccaacttactaggcagcaaattgtctagataaaatactgaatcaaacggtgcagacgtattggcggatctaatggaatccaattgattaactatcttttgaaaatatacatttttatgatccaatacttgtaagaatatagaaataatgataagtccatcatcgtgtttttttgcctcttcataagaactatattttttcttattccaatgaacaagattaatctctccagagtatttgtacacatctatcaagtgattggatccataatcgtcttcctttccccaatatatatgtagtgatgataacacatattcattggggagaaaccctccacttatatatcctcctttaaaattaatccttactagttttccagtgttctggatagtggttggtttcgactcattataatgtatgtctaacggcttcaatcgcgcgttagaaattgcttttttagtttctatattaataggagatagttgttgcggcatagtaaaaatgaaatgataactgtttaaaaatagctcttagtatgggaattacaatggatgaggaagtgatatttgaaactcctagagaattaatatctattaaacgaataaaagatattccaagatcaaaagacacgcatgtgtttgctgcgtgtataacaagtgacggatatccgttaataggagctagaagaacttcattcgcgttccaggcgatattatctcaacaaaattcagattctatctttagagtatccactaaactattacggtttatgtactacaatgaactaagagaaatctttagacggttgagaaaaggttctatcaacaatatcgatcctcactttgaagagttaatattattgggtggtaaactagataaaaaggaatctattaaagattgtttaagaagagaattaaaagaggaaagtgatgaacgtataacagtaaaagaatttggaaatgtaattctaaaacttacaacacgggataaattatttaataaagtatatataagttattgcatggcgtgttttattaatcaatcgttggaggatttatcgcatactagtatttacaatgtagaaattagaaagattaaatcattaaatgattgtattaacgacgataaatacgaatatctgtcttatatttataatatgctagttaatagtaaatgaacttttacagatctagtataattagtcagattattaagtataatagacgactagctaagtctattatttgcgaggatgactctcaaattattacactcacggcattcgttaaccaatgcctatggtgtcataaacgagtatccgtgtccgctattttattaactactgataacaaaatattagtatgtaacagacgagatagttttctctattctgaaataattagaactagaaacatgtttagaaaaaaacgattatttctgaattattccaattatttgaacaaacaggaaagaagtatactatcgtcatttttttctctagatccagctactactgataatgatagaatagacgctatttatccgggtggcatacccaaaaggggtgagaatgttccagagtgtttatccagggaaattaaagaagaagttaatatagacaattcttttgtattcatagacactcggttttttattcatggcatcatagaagataccattattaataaattttttgaggtaatcttctttgtcggaagaatatctctaacgagtgatcaaatcattgatacatttaaaagtaatcatgaaatcaaggatctaatatttttagatccgaattcaggtaatggactccaatacgaaattgcaaaatatgctctagatactgcaaaacttaaatgttacggccatagaggatgttattatgaatcattaaaaaaattaactgaggatgattgattagaaaatataaattaatttaccatcgtgtatttttataacgggattgtccggcatatcatgtagatagttaccgtctacatcgtatactcgaccatctacgcctttaaatcctctatttattgacattaatctattagaattggaataccaaatattagtaccctcaattagtttattggtaatattttttttagacgatagatcgatggctcttgaaaccaaggttttccaaccggactcattgtcgatcggtgaaaagtctttttcattagcatgaatccattctaatgatgtatgtttaaacactctaaacaattggacaaattcttttgatttgctttgaatgatttcaaataggtcttcgtctacagtaggcataccattagataatctagccattataaagtgcacgtttacatatctacgttctggaggagtaagaacgtgactattgagacgaatggctcttcctactatctgacgaagagacgcctcgttccatgtcatatctaaaatgaagatatcattaattgagaaaaaactaataccctcgcctccactagaagagaatacgcatgttttaatgcattctccgttagtgtttgattcttggttaaactcagccaccgccttgattctagtatcttttgttctagatgagaactctatattagagataccaaagactttgaaatatagtaataagatttctattcctgactgattaacaaatggttcaaagactagacatttaccatgggatgctaatattcccaaacatacatctataaatttgacgcttttctcttttaattcagtaaatagagagatatcagccgcactagcatcccctttcaatagttctccctttttaaaggtatctaatgcggatttagaaaactctctatctcttaatgaatttttaaaatcattatatagtgttgctatctcttgcgcgtattcgcccggatcacgattttgtctttcaggaaagctatcgaacgtaaacgtagtagccatacgtctcagaattctaaatgatgatatacctgtttttatttcagcgagtttagccttttgataaatttcttcttgctttttcgacatattaacgtatcgcattaatactgttttcttagcgaatgatgcagacccttctacgtcatcaaaaatagaaaactcgttattaactatatacgaacatagtcctcctagtttggagactaattctttttcatcgactagacgtttattctcaaatagtgattggtgttgtaaggatcctggtcgtagtaagttaaccaacatggtgaattcttgcacactattgacgataggtgtagccgataaacaaatcatcttatggttttttaacgcaatggtcttagataaaaaattatatactgaacgagtaggacggatcttaccatcttctttgattaatgatttagaaatgaagttatgacattcatcaatgatgacgcatattctactcttggaattaatagttttgatattagtaaaaaatttatttctaaaattttgatcatcgtaattaataaaaatacaatccttcgttatctctggagcgtatctgagtatagtgttcatccaaggatcttctatcaaagcctttttcaccaataagataatagcccaattcgtataaatatccttaagatgtttgagaatatatacagtagtcattgttttaccgacacccgtttcatggaacaataaaagagaatgcatactgtctaatcctaagaaaactcttgctacaaaatgttgataatccttgaggcgtactacgtccgaccccatcatttcaacgggcatattagtagttctgcgtaaggcataatcgatataggccgcgtgtgatttactcatttatgagtgataagtaataactatgttttaaaaatcacagcagtagtttaactagtcttctctgatgtttgttttcgatactttttgaatcagaagtcatactagaataaagcaacgagtgaacgtaatagagagcttcgtatactctattcgaaaactctaagaacttattaatgaattccgtatccactggattgtttaaaatactaaattgaacactgttcacatccttccaagaagaagacttagtgacggacttaacatgagacataaataaatccaaattttttttacaaacatcactagccaccataatggcgctatctttcaaccagctatcgcttacgcattttagcagtctaacatttttaaagagactacaatatattctcatagtatcgattacacctctaccgaataaagttggaagtttaataatacaatatttttcgtttacaaaatcaaataatggtcgaaacacgtcgaaggttaacatcttataatcgctaatgtatagattgttttcagtgagatgattattagatttaatagcatctcgttcacgtttgaacagtttattgcgtgcgctgaggtcggcaactacggcgtccgctttagtactcctcccataatactttacgctattaatctttaaaatttcatagactttatctagatcgctttctggtaacatgatatcatgtgtaaaaagttttaacatgtcggtcggcattctatttagatcattaactctagaaatctgaagaaagtaattagctccgtattccagactaggtaatgggcttttacctagagacagattaagttctggcaatgtttcataaaatggaagaaggacatgcgttccctcccggatattttttacaatttcatccatttacaactctatagtttgttttcattattattagttattatctcccataatcttggtaatacttaccccttgatcgtaagataccttatacaggtcattacatacaactaccaattgtttttgtacataatagattggatggttgacatccatggtggaataaactactcgaacagatagtttatctttccccctagatacattagccgtaatagttgtcggcctaaagaatatctttggtgtaaagttaaaagttagggttcttgttccattattgctttttgtcagtagttcattataaattctcgagatgggtccgttctctgaatatagaacatcatttccaaatctaacttctagtctagaaataatatcggtcttattcttaaaatctattcccttgatgaagggatcgttaatgaacaaatccttggcctttgattcggctgatctattatctccgttatagacgttacgttgactagtccaaagacttacaggaatagatgtatcgatgatgttgatactatgtgatatgtgagcaaaaattgttctcttagtggcatcgctatatgttccagtaatggcggaaaactttttagaaatgttatatataaaagaattttttcgtgttccaaacattagcagattagtatgaagataaacactcatattatcaggaacattatcaatttttacatacacatcagcatcttgaatagaaacgataccatcttctggaacctctacgatctcggcagactccggataaccagtcggtgggccatcactaacaataactagatcatccaacaatctactcacatatgcatctatataatctttttcatcttgtgagtaccctggatacgaaataaatttattatccgtatttccataataaggtttagtataaacagagagcgatgttgccgcatgaacttcagttacagtcgccgttggttggtttatttgacctattactctcctaggtttctctataaatgatggtttaatttgtacattcttaaccatatatccaataaagctcaattcaggaacataaacaaattctttgttgaacgtttcaaagtcgaacgaagagtcacgaataacgatatcggatactggattgaaggttaccgttacggtaatttttgaatcggatagtttaagactgctgaatgtatcttccacatcaaacggagttttaatataaacgtatactgtagatggttctttaatagtgtcattaggagttaggccaatagaaatatcattaagttcactagaatatccagaatgtttcaaagcaattgtattattgatacaattattatataattcttcgccctcaatttcccaaataacaccgttacacgaagagatagatacgtgattaatacatttatatccaacatatggtacgtaactgaatcttcccatacctttaacttctggaagttccaaactcagaaccaaatgattaagcgcagtaatatactgatccctaatttcgaagctagcgatagcctgattgtctggaccatcgtttgtcataactccggatagagaaatatattgcggcatatataaagttggaatttgactatcgactgcgaagacattagaccgtttaatagagtcatccccaccgatcaaagaattaatgatagtattattcattttctatttaaaatggaaaaagcttacaataaactccgtagagaaatatctataatttgtgagttttccttaaagtaacagcttccgtaaacgccgtctttatctcttagtaggtttattgtatttatgaccttttccttatcttcatagaatactaaaggcaacaaagaaatttttggttcttctctaagagctacgtgagacttaaccatagacgccaacgaatccctacatattttagaacagaaataccctacttcaccacccttgtatgtctcaatactaataggtctaaaaaccaaatcttgattacaaaaccaacacttatcaattacactatttgtcttaatagacacatctgccatagatttataatactttggtagtatacaagcgagtgcttcttctttagcgggcttaaagactgctttaggtgctgaaataaccacatctggaaggcttactcgcttagccatttaattacggaactatttttttatacttctaatgagcaagtagaaaacctctcatctacaaaaacgtactcgtgtccataatcctctaccatagttacacgttttttagatctcatatgtgctaaaaagttttcccatactaattggttactattatttttcgtataatttttaacagtttgaggttttagatttttagttacagaagtgatatcgaatattttatccaaaaagaatgaataattaattgtcttagaaggagtgttttcttggcaaaagaataccaagtgcttaaatatttctactacttcattaatcttttctgtactcagattcagtttctcatcttttacttgattgattatttcaaagactaacttataatcctttttatttattctctcgttagccttaagaaaactagatacaaaatttgcatctacatcatccgtggatatttgatttttttccatgatatccaagagttccgagataatttctccagaacattgatgagacaataatctccgcaatacatttctcaaatgaataagtttattagacacatggaagtttgactttttttgtacctttgtacatttttgaaatacagactcgcaaaaaatacaatattcatatccttgttcagatactataccgttgtgtctacaaccgctacataatcgtagattcatgttaacactctacgtatctcgtcgtccaatattttatataaaaacattttatttctagacgttgccagaaaatcctgtaatatttttagttttttgggctgtgaataaagtatcgccctaatatggttaccgtcttccgccaatatagtagttaaattatccgcacatgcagaagaacaccgcttaggcggattcagtacaatgttatatttttcgtaccaactcatttaaatatcataatctaaaatagttctgtaatatgtctagcgctaatatattgatcataatcctgtgcataaattaagatacaacaatgtctcgaaatcatcgacatggcttcttccatagttagaagatcgtcgtcaaagttagcaacgtgattcatcaacatttgctgttttgaggcagcaaatactgaaccgtcgccattcaaccattcataaaaaccatcgtctgaatccattgataatttcttgtactggtttttgagagctcgcatcaatctagcatttctagctcccggattgaaaacagaaagaggatcgtacatccagggtccattttctgtaaatagaatcgtataatgtcccttcaagaagatatcagacgatccacaatcaaagaattggtctccgagtttgtaacaaacagcggactttaacctatacatgataccgtttagcataatttctggtgatacgtcaatcggagtatcatctattagagatctaaagccggtgtaacattctccaccaaacatattcttattctgacgtcgttctacataaaacatcattgctccattaacgataacaggggaatgaacagcactacccatcacattagttcccaatggatcaatgtgtgtaactccagaacatcttccatatcctatgttaggaggagcgaacaccactcttccactattgccatcgaatgccatagaataaatatccttggaattgatagaaatcggactgtcggatgttgtgatcatcttcataggattaacaactatgtatggtgccgcctgaagtttcatatcgtaactgatgccgtttataggtctagccacagaaaccaacgtaggtctaaatccaactatagacaaaatagaagccaatatctgttcctcatctgtcataacttgagagcatccagtatgaataatcttcattagatggggatctaccgcatcatcatcgttacaataaaaaattcccattctaatgttcataattgcttttctaatcatggtatgcatgtttgctctctgaatctctgtggaaattagatctgatacacctgtaatcactatcggattatcctccgtaagacgattaaccaacaacatataattataagactttacttttctaaattcataaagttgctggattaggctataggtgtctccatgtacatacgcgttctcgagcgcaggaagtttaataccgaatagtgccatcagaataggatgaatatagtaattagtttctggttttctataaataaaagacaaatcttgtgaactagacatatcggtaaaatgcatggattggaatcgtgtagtcgacagaagaatatgatgattagatggagagtatattttatctaactctttgagttggtcaccgattctaggactagctcgagaatgaataagtactaaaggatgagtacatttcacagaaacactagcattgttcaatgtgctctttacatgggtaaggagttgaaatagctcgtttctatttgttctgacaatatttagtttattcataatgttaagcatatcctgaatagtaaagttagatgtgtcatacttgttagtagttagatatttagcaattgcattcccatcatttctcaatctcgtactccaatcatgtgtagatgctacttcgtcgatggaaaccatacaatcctttttgataggctgttgagattgatcatttcctgcacgtttaggtttggtacgttgatttctagcccctgcggatataaagtcatcgtctacaatttgggacaatgaattgcatacactacaagacaaagatttatcagaagtgtgaatatgatcttcatctaccaaagaaagagtttgattagtataactagattttagtcctgcgttagatgttaaaaaaacatcgctattgaccacggcttccattatttatattcgtagtttttactcgaaagcgtgattttaatatccaatcttattacttttggaatcgttcaaaacctttgactagttgtagaatttgatctattgccctacgcgtatactcccttgcatcatatacgttcgtcaccagatcgtttgtttcggcctgaagttggtgcatatctctttcaacattcgacatgagatccttaagggccatatcgtctagattttgttgagatgctgctcctggatttggattttgttgtgctgttgtacatactgtaccaccagtaggtgtaggagtacatacagtggccacaataggaggttgagaaagtgtaaccgttggagtagtacaagaaatacttccatccgattgttgtgtacatgtagttgttggtaacgtctgagaaggttgggtagatggcggcgtcgtcgttttttgatctttattaaatttagagataatatcctgaacagcattgctcggcgtcaacgctggaaggagtgaactcgccggcgcatcagtatcttcagacagccaatcaaaaagattagacatatcagatgatgtattagtttgttgtcgtggttttggtgtaggagcagtactactaggtagaagaataggagccgatgtagctgttggaaccggctgtggagttatatgaatagttggttgtagcggttggataggctgtctgctggcggccatcatattatctctagctagttgttctcgcaactgtctttgataatacgactcttgagactttagtcctatttcaatcgcttcatcctttttcgtatccggatccttttcttcagaataatagattgacgactttggtgtagaggattctgccagcctctgtgagaacttgttaaagaagtccatttaaggctttaaaattgaattgcgattataagattaaatggcagacacagacgatattatcgactatgaatccgatgatctcaccgaatacgaggatgatgaagaagaggaagaagatggagagtcactagaaactagtgatatagatcccaaatcttcttataagattgtagaatcagcatccactcatatagaagatgcgcattccaatcttaaacatatagggaatcatatatctgctcttaaacgacgctatactagacgtataagtctatttgaaatagcgggtataatagcagaaagctataacttgcttcaacgaggaagattacctctagtttcagaattttctgacgaaacgatgaagcaaaatatgctacatgtaattatacaagagatagaggagggttcttgtcctatagtcatcgaaaagaacggagaattgttgtcggtaaacgattttgacaaagatggtctaaaattccatctagactatattatcaaaatttggaaacttcaaaaacgatattagaatttatacgaatatcgttctctaaatgtcacaatcaagtctcgcatgttcagcaatttattgtcgtactttatatcgtgttcattaacgatatcttgcaaaatagtaatgattctatcttccttcgatagatattcttcagagattattgtcttatattctttcttgttatcagatatgaatttgataagactttgaacattattgatacccgtctgtttaattttttctacagatattttagttttggcagattctatcgtatctgtcaatagacatccaacatcgacattcgacgtcaattgtctataaatcaacgtataaattttagaaataacattagcgaattgttgtgcgttgatgtcgttattctgaaacagtatgattttaggtagcattttcttaacaaagagaacgtatttattgttactcagttgaacagatgatatatccagattactaacgcatctgattccgtataccaaactttcagaagaaatggtatacaattgtttgtattcattcaatgtctctttttcagaaattagtttagagtcgaatactgcaataattttcaagagatagttttcatcagataagattttatttagtgtagatatgataaaactattgttttgttggagaacttgatacgccgcgttctctgtagtcgacgctctcaaatgggaaacaatctccattatttttttggaatcggatactatatcttcggtatcttgacgcagtctagtatacatagagttaagagagattagagtttgtacattaagcaacatgtctctaaatgtggctacaaacttttcctttttcacatcatctagtttattatataccgatttcacaacggcaccagatttaaggaaccagaatgaaaaactctgataactacaatatttcatcatagttacgattttatcatcttctatagttggtgtaatagcgcatacctttttctccaagactggaaccaacgtcataaaaatgtttaaatcaaaatccatatcaacatctgatgcgctaagaccagtctcgcgttcaagattatctttactaatggtgacgaactcatcgtataaaactctaagtttgtccattatttatttacagatttagttgtttaatttatttgtgctcttccagagttgggatagtatttttctaacgtcggtattatattattaggatctacgttcatatgtatcataatattaatcatccacgttttgataaatctatctttagcttctgaaataacgtatttaaacaaaggagaaaaatatttagctacggcatcagacgcaataacattttttgtaaatgtaacgtatttagacgacagatcttcgttaaaaagttttccatctatgtagaatccatcggttgttaacaccattcccgcgtcagattgaataggagtttgaatagtttgttttggaaatagatccttcaataacttatagttgggtgggaaaaaatcgattttatcactagactctttcttttttactatcattacctcatgaactatttcttgaatgagtatatgtattttctttcctatatcggacgcgttcattggaaaatataccatgtcgttaactataagaatatttttatcctcgtttacaaactgaataatatcagatgtagttcgtaaacgaactatatcatcaccagcacaacatctaactatatgatatccactagtttcctttagccgtttattatcttgttccatattagcagtcattccatcatttaagaaggcgtcaaagataatagggagaaatgacattttggattctgttacgactttaccaaaattaaggatatacggacttactatctttttctcaacgtcaatttgatgaacacacgatgaaaatgtgcttctatgagattgatcatgtagaaaacaacaagggatacaatatttccgcatatcatgaaatatattaagaaatcccaccttattatatttccccaaaggatccatgcacgtaaacattatgccgttatcattaataaagacttctttctcatcggatctgtaaaagttgttactgatttttttcattccaggatctagataattaataatgatgggttttctattcttattctttgtattttggcatatcctagaccagtaaacagtttccactttggtaaaatcagcagacttttgaacgctattaaacatggcattaatggcaataactaaaaatgtaaaatatttttctatgttaggaatatggtttttcactttaatagatatatggtttttggccaaaatgatagatatttttttatccgaggatagtaaaatattattagtcgccgtctctataaaaatgaagctagtctcgatatccaattttattctagaattgataggagtcgccaaatgtaccttatacgttatatctcccttgatgcgttccatttgtgtatctatatcggacacaagatctgtaaatagttttacgttattaatcatcacggtatcgccgtcgctagataacgctaatgtaccatccaagtcccaaatggagagatttaactgttcatcgtttagaataaaatgattaccggtcatattaataaagtgttcatcgtatctagataacaacgacttataattaatgtccaagtcttgaactcgctgaatgatcttttttaacccagttagttttagattggtacgaaatatattgttaaactttgattctacagtaatgtccaaatctagttgtggaaatacttccatcaacattgtttcaaacttgataatattattatctacatcttcgtacgatccaaattccggaatagatgtatcgcacgctctggccacccagataaccaaaaagtcacacgctccaggatatacattgtataaaaagctatcgttttttagtagggtttttttctgcgtgtatacgaagggattaaaaatagtattatcaacgtaactatattccaaattattcttatgagaatagataataatatcgtccttaatatctaacaaatttcctaaatatccctttaattgagtcattcgaagcgtcaatagaatatgtctcttaactatttccggctgttgtatatttaaatgacttcgtaaaaaataatatatgggcgacttctcatctatgtaatcatatggagtgagatatagggctcgttctacctcctgccccttacccacctgtaataccaattgcggacttactatatatcgcatatttatatcgtggggtaaagtgaaaatctactaccgatgatgtaagtcttacaatgttcgaaccagtaccagatcttaatttggaggcctccgtagaactaggggaggtaaatatagatcaaacaacacctatgataaaggagaatagcggttttatatcccgcagtagacgtctattcgcccatagatctaaggatgatgagagaaaactagcactacgattctttttacaaagactttattttttagatcatagagagattcattatttgttcagatgcgttgacgctgtaaaagacgtcactattaccaaaaaaaataacattatcgtggcgccttatatagcacttttaactatcgcatcaaaaggatgcaaacttacagaaacaatgattgaagcattctttccagaactatataatgaacatagtaagaaatttaaattcaactctcaagtatccatcatccaagaaaaactcggataccagtttggaaactatcacgtttatgattttgaaccgtattactctacagtagctctggctattcgagatgaacattcatctggcatttttaatatccgtcaagagagttatctggtaagttcattatctgaaataacatatagattttatctaattaatctaaaatctgatcttgttcaatggagtgctagtacgggcgctgtaattaatcaaatggtaaatactgtattgattacagtgtatgaaaagttacaactggtcatagaaaatgattcacaatttacatgttcattggctgtggaatcaaaacttccaataaaattacttaaagatagaaatgaattatttacaaaattcattaacgagttaaaaaagaccagttcattcaagataagcaaacgcgataaggatacgctactaaaatattttacttaggactggagttagaatttatagacgactcatttcgtttatcattgttactattattactattactatcattattagtgttggcattattagtattcttcttgtcatcttgttcagaaatatacagcaatgctatacctaatactaaatacattatcatgctcgcaatggctctaacaacaacgaaccaaaatgaatttggtcgtagcttttgttcacaaaaatacataaagaaatgtctacataaatctatggcgccattggctacttgaaatagcgccagtcctcctacagattttaatatagctgtataacatgacatttattcatcatcaaaagagacagagtcaccatctgtcatatttagattttttttcatgtgttcaaagtatcctctactcatttcattataatagtttatcatacttagaattttaggacggatcaatgagtaagacttgactagatcgtcagtagtaatttgtgcatcgtctattctgcatccgcttcgtcgaataatgtatagcatcgctttgagattctccatagctatcaagtctttatacaatgacatggaaatatctgtgaatactttatacttctccaacatcgatgccttaacatcatcgcctactttagcattgaaaatacgttctattgtgtagatggatgtagcaagatttttaaacaacaatgccatcttacacgatgattgcctcaagtctccaatcgtttgtttagaacgattagctacagagtccaatgcttggctgactagcatattattatctttagaaattgtattcttcaatgaggcgtttatcatatctgtgatttcgttagtcatattacagtctgactgggttgtaatgttatccaacatatcacctatggatacggtacacgtaccagcatttgtaataatcctatctaagatgttgtatggcattgcgcagaaaatatcttctcctgtaatatctccactctcgataaatctactcagattattcttaaatgccttattctctggagaaaagatatcagtgtccatcatttcattaatagtatacgcagaaaagataccacgagtatcaattctatccaagatacttatcggttccgagtcacagataatggtttcctctccttcgggagatcctgcatagaaatatctaggacaatagtttctatactgtctgtaactctgataatctctaaagtcactaactgataccatgaaattgagaagatcaaacgctgaagtaattaatttttctgcctcgtttttactacaactagttttcatcaatgtagtgacgatgtattgtttagttacttttggtctaatactgatgatagagatattattgcttcccataatggatcttctagtagtcaccttaaagcccattgatgcgaatagcagatagataaagtcttggtatgactcctttctaatatagtacggactacctttgtcacccaactttatacccacataagccataacaacctctttaatagccgtttcatgaggtttatcagccatgagcctgagtagttggaagaatctcatgaatcccgtctcagaaagtcctatatgcatgatagatttatctttcctgggaaactctcgtatagtcatagatgaaatactctttaaagtttctgaaataagattagtaacagtcttacctccgactactctaggtaacaaacaaactctaataggtgttttctctgcggagataatatcagaaaggatagagcaataagtagtattattgtgattataaagaccgaatacataacaggtagaatttataaacatcatgtcctgaaggtttttagacttgtattcctcgtaatccataccgtcccaaaacatggatttggtaactttgatagccgtagatctttgttccttcgccaacaggttaaagaaattaataaagaatttgtggtttctacctatgtctacaaattgcacgtttggaagcgccacggttacattcactgcagcattttgaggatcgcgagtatgaagtacgatgttattgtttactggtatatctggaaagaaatctaccagtctaggaataagagattgatatcgcatagaaatagtaaagtttataatctcatcatcgaagagcattttgttaccattgtaataaatatccactctgtcatatgtataaatgaagtactgttcaaacatgatgagatgtttatatgttggcatagtagtgagatcgacgtttggtaatggcaatgtattaagattaactccataatgtctagcagcatctgcgatgttataagcgtcgtcaaagcggggtcgatcttgtattgttatatattgtctaacacctataagattatcaaaatcttgtctgcttaatacaccgttaacaatttttgccttgaattcttttattggtgcattaataacatccttatagaggatgttaaacaaataagtgttatcaaagttaagatctggatatttcttttctgctagaacatccattgagtcggagccatctggtttaatataaccaccgataaatctagctctgtattctgtatccgtcaatctaatattaagaaggtgttgagtgaaaggtggaagatcgtaaaagctgtgagtattaatgataggattagtttccgaactaatgttaattggggtattaataatatctatatttccagcgttaagtgtaacattaaacagttttaattcacgtgacgtggtatcaattaaataattaatgcccaatttggatatagcagcctgaagctcatcttgtttagttacggatcctaatgagttattaagcaatatatcgaacggatgaacgaaggttgttttaagttggtcacatactttgtaatctagacatagatgcggaagaacggtagaaactatacgaaataaatattcagagtcctctaattgatcaagagtaactattgacttaataggcatcatttatttagtattaaatgacgaccgtaccagtgacggatatacaaaacgatttaattacagagttttcagaagataattatccatctaacaaaaattatgaaataactcttcgtcaaatgtctattctaactcacgttaacaacgtggtagatagagaacataatgccgccgtagtgtcatctccagaggaaatatcctcacaacttaatgaagatctatttccagatgatgattcaccggccactattatcgaacgagtacaacctcatactactattattgacgatactccacctcctacgtttcgtagagagttattaatatcggaacaacgtcaacaacgagaaaaaagatttaatattacagtatcgaaaaatgctgaagcaataatggaatctagatctatgataacttctatgccaacacaaacaccatccttgggagtagtttatgataaagataaaagaattcagatgttagaggatgaagtggttaatcttagaaatcaacgatctaatacaaaatcatctgataatttagataattttaccaaaatactatttggtaagactccgtacaaatcaacagaagttaataagcgtatagccatcgttaattatgcaaatttgaacgggtcccccttatcagtcgaggacttggatgtttgttcggaggatgaaatagatagaatctataaaacgattaaacaatatcacgaaagtagaaaacgaaaaattatcgtcactaacgtgattattattgtcataaacattatcgagcaggcattgctaaaactcggatttgaagaaatcaaaggactgagtaccgatatcacttcagaaattatcgatgtggagatcggagatgactgcgatgctgtagcatcaaaactaggaatcggtaacagtccggttcttaatattgtattgtttatactcaagatattcgttaaacgaattaaaattatttaatttaatacattcccatatccagacaacaatcgtctggattaatctgttcctgtcgtctcataccggacgacatattaatctttttattagtgggcatctttttagatggtttctttttcccagcattaactgagtcgatacctagaagatcgtgattgatctctccgaccattccacgaacttctaattggccgtctctgacggtaccataaactattttaccagcattagtaacagcttggacaatctgaccatccatcgcattgtacgatgtagtagtaactgttgttctacgtctaggagcaccagaagtatttttggagcccttggatgttgatgtagaagaagacgaggattttgattttggtttacatgtaatacattttgaactctttgattttgtatcacatgcgccggcagtcacatctgtttgagaattaagattattgttgcctcctttgacggctgcatctccaccgatttgcgctagtagatttttaagctgtggtgtaatcttattaactgtttcgatataatcatcgtaactgcttctaacggctaaattttttttatccgccatttagaagctaaaaatatttttatttatgcagaagatttaactagattatacaatgaactaatatgatccttttccagattatttacaaacttggtattttttggttctggaggaggcgaatttaaattcggacttggattcggattttgtaagttcttgatcttattatacatcgagtataggatggcgacagtaactgctacacaaataccgatcaaaagaagaataccaatcatttattgacaataacttcactattgatcaagtatgcaatatatcatcttttcactaaataagtagtaataatgattcaacaatgtcgagatatatggacgataataatttagttcatggaaatatcgctatgattggtgtgaatgactccgctaactctgtggggtgcgcagtgctttccccacatagaataaattagcattccgactgtgataataataccaagtataaacgccataatactcaatactttccatgtacgagtgggactggtagacttactaaagtcaataaaggcgaagatacacgaaagaatcaaaagaatgattccagcgattagcacgccggaaaaataatttccaatcataagcatcatgtccatttaactaataaaaattttaaatcgccgaatgaacaaagtggaatataaaccatataaaaacaatagtttgtactgcaaaaataatatctatttttgttttcgaagatatggtaaaattaaatagtagtacacagcatgttataactaacagcagcaacggctcgtaattacttatcatttactagacgaaaaggtggtgggatattttcttgctcaaataatacgaatatatcacccatccattttatgcgatgtttatatactctaatctttaatagatctatagacgacgggtttaccaacaatatagattttatcgattcatctaatttaaacccttccttaaacgtgaatgatctattatctggcataacgatgaccctacctgatgaatcggacaatgtactgggccatgtagaataaattatcaacgaattatcgtctacgaacatttatatcatttgttttaattttaggacgcgaataaatggatataaaatagaaaataacagatattacaaccagtgttatggccgcgcccaaccaggtaggcagttttattttatcttttactacaggttctcctggatgtacgttaccaacggcggacgtagttctagtacaattagacgtaagttccgcttgggaattttttaacgctaaagagttaacgttaatcgtgcacccaacgtatttacatctagttcgttgaacatcttgattataatataaccattttctatctctagattcgtcagtgcactcatgtaaccaacataccctaggtcctaaatatttatctccggaattagattttggataattcgcgcaccaacaatttctatttcctttatgatcgttacaaaagacgtataatgccgtatccccaaaagtaaaataatcaggacgaataattctaataaactcagaacaatatctcgcatccatatgtttggagcaaatatcggaataagtagacatagccggtttccgttttgcacgtaaccattctaaacaattggggtttccaggatcgtttctacaaaatccagtcatgaaatcgtcacaatgttctgtcttgtaattattattaaatatttttggacagtgtttggtatttgtcttagaacaacattttgccacgctatcactatcgcccaggagataatccttttttataaaatgacatcgttgcccggatgctatataatcagtagcgtgttttaaatccttaatatattcaggagttacctcgttctgataatagattaatgatccaggacgaaatttgaaagaactacatggttctccatgaattaatacatattgtttagcaaattcaggaactataaaactactacaatgatctatcgacataccatctatcaaacaaaacttgggtttaatttctcccggagatgtttcataatagtacgtataactttcttctgcaaacttaacagctctattatattcaggataattaaaacctaattccatatatttgtctcgtatatctgctattcctggtgctattttgattctattaagagtaacagctgcccccattcttaataatcgtcagtatttaaactgttaaatgttggtatatcaacatctaccttatttcccgcagtataaggtttgttgcaggtatactgttcaggaatggttacatttatacttcttctatagtcctgtctttcgatgttcatcacatatgcaaagaacagaataaacaaaataatgtaagaaataatattaaatatctgtgaattcgtaaatacattgattgccataataattacagcagctacaatacacacaatagacattcccacagtgttgccattacctccacgatacatttgagttactaagcaataggtaataactaagctagtaagaggcaatagaaaagatgagataaatatcatcaatatagagattagaggagggctatatagagccaagacgaacaaaatcaaaccgagtaacgttctaacatcattatttttgaagattcccaaataatcattcattcctccataatcgttttgcatcatacctccatctttaggcataaacgattgctgctgttcctctgtaaataaatctttatcaagcactccagcacccgcagagaagtcgtcaagcatattgtaatatcttaaataactcatttatatattaaaaaatgtcactattaaagatggagtataatctttatgccgaactaaaaaaaatgacttgtggtcaacccctaagtctttttaacgaagacggggatttcgtagaagttgaaccgggatcatcctttaagtttctgatacctaagggattttacgcctctccttccgtaaagacgagtctagtattcgagacattaacaacgaccgataataaaatcactagtatcaatccaacaaatgcgccaaagttatatcctcttcaacgcaaagtcgtatctgaagtagtttctaatatgaggaaaatgatcgaatcaaaacgtcctctatacattactcttcacttggcgtgtggatttggtaagactattaccacgtgttatcttatggctacacacggtagaaaaaccgtcatttgcgtacccaataaaatgttaatacatcaatggaagacacaggtagaggcagtcggattggaacataagatatccatagatggagtaagtagtctattaaaggaactaaagactcaaagtccggatgtattaatagtagtcagtagacatctgacaaacgatgccttttgtaaatatatcaataagcattatgatttgttcatcttggatgaatcacatacgtataatctgatgaacaatacagcagttacaagatttttagcgtattatcctccgatgatgtgttattttttaactgctacacctagaccatctaaccgaatttattgtaacagtattattaatattgccaagttatccaatctaaaaaaaactatctatgcagtagatagtttttttgagccatattccacagataatattagacatatggtaaaacgactagatggaccatctaataaatatcatatatataccgagaagttattatctgtagacgagcctagaaatcaacttattcttgataccctggtagaagaattcaagtcaggaactattaatcgcattttagttattactaaactacgtgaacatatggtattattctacaaacgattattagattttttcggaccagaggttgtatttataggagacgcccaaaatagacgtactccagatatggtcaaatcaatcaaggaactaaatagatttatattcgtatccaccttattttattccggtactggtttagatattcctagtttggattcgttgttcatttgctcggcagtaatcaacaatatgcaaatagagcaattactagggagggtatgtcgagaaacagaactattagataggacggtatatgtatttcctaacacatccatcaaagaaataaagtacatgataggaaatttcatgcaacgaattattagtctgtctgtagataaactaggatttaaacaaaaaagttatcggaaacatcaagaatccgatcccacttctgtatgtacaacatcctccagagaagaacgtgtattaaatagaatatttaactcgcaaaatcgttaagaagtttaagcgacgatccgcatgctgcgcaggccagtgtattacccctcatagtattaatataatccaatgatacttttgtgatgtcggaaatcttaaccaatttagactgacaggcagaacacgtcatgcaatcatcatcgtcatcgataactgtagtcttgggcttctttttgcggctcttcattccggaacgcacattggtgctatccatttaggtagtaaaaaataagtcagaatatgccctataacacgatcgtgcaaaacctggtatatcgtctctatctttatcacaatatagtgtatcgacatttttattattattgacctcgtttatcttggaacatggaatgggaacatttttgttatcaacggccacctttgccttaattccagatgttgtaaaattataactaaacagtctatcatcgacacaaatgaaattcttgtttagacgtttgtagtttacgtatgcggctcgttcgcgtctcattttttcagatattgcaggtactataatattaaaaataagaatgaaataacataggattaaaaataaagttatcatgacttctagcgctgatttaactaacttaaaagaattacttagtctgtacaaaagtttgagattttcagattctgcggctatagaaaagtataattctttggtagaatggggaacatctacttactggaaaataggcgtgcaaaaggtagctaatgtcgagacgtcaatatctgattattatgatgaggtaaaaaataaaccgtttaatattgatccgggctattacattttcttaccggtatattttgggagcgtctttatttattcgaagggtaaaaatatggtagaacttggatctggaaactcttttcaaataccagatgatatgcgaagtgcgtgtaacaaagtattagacagcgataacggaatagactttctgagatttgttttgttaaacaatagatggataatggaagatgctatatcaaaatatcagtctccagttaatatatttaaactagctagtgagtacggattaaacatacccaaatatttagaaattgaaatagaggaagacacattatttgacgacgagttatactctattatagaacgctctttcgatgataaatttccaaaaatatccatatcgtatattaagttgggagaacttagacggcaagttgtagactttttcaaattctcattcatgtatattgagtccatcaaggtagatcgtataggagataatatttttattcctagcgttataacaaaatcaggaaaaaagatattagtaaaagatgtagaccatttaatacgatccaaggttagagaacatacatttgtaaaagtaaaaaagaaaaacacattttccattttatacgactatgatggaaacggaacagaaactagaggagaagtaataaaacgaattatagacactataggacgagactattatgttaacggaaagtatttctctaaggttggtagtgcaggcttaaagcaattgactaataaattagatattaatgagtgcgcaactgtcgatgagttagttgatgagattaataaatccggaactgtaaaacgaaaaataaaaaaccaatcagcatttgatttaagcagagaatgtttgggatatccagaagcggattttataacgttagttaataacatgcggttcaaaatagaaaattgtaaggttgtaaatttcaatattgaaaatactaattgtttaaataacccgagtattgaaactatatatggaaactttaaccagttcgtctcaatctttaatgtcgtcaccgatgtcaaaaaaagattattcgagtgaaataatatgcgcctttgatataggtgcaaaaaatcctgccagaactgttttagaagtcaaggataactccgttagggtattggatatatcaaaattagactggagttctgattgggaaaggcgcatagctaaagatttgtcacaatatgaatacactacagttcttctagaacgtcagcctagaaggtcgccgtatgttaaatttatctattttattaaaggctttttatatcatacatcggctgccaaagttatttgcgtctcgcctgtcatgtctggtaattcatatagagatcgaaaaaagagatcggtcgaagcatttcttgattggatggacacattcggattgcgagactccgttccggatagacgcaaattagacgatgtagcggatagtttcaatttggctatgagatacgtattagataaatggaatactaattatacaccttataataggtgtaaatctagaaattacataaaaaaaatgtaataacgttagtaacgccattatggataatctatttacctttctacatgaaatagaagatagatatgccagaactatttttaactttcatctaataagttgcgatgaaataggagatatatatggtcttatgaaagaacgcatttcctcagaggatatgtttgataatatagtgtataataaagatatacatcctgccattaagaaactagtgtattgcgacatccaacttactaaacacattattaatcagaatacgtatccggtatttaacgattcttcacaagtgaaatgttgtcattatttcgacataaactcagataatagcaatattagctctcgtacagtagagatatttgagagggaaaagtcatctcttgtatcatatattaaaactaccaataagaagagaaaggtcaattacggcgaaataaagaaaactgttcatggaggcactaatgcaaattacttttccggtaaaaagtctgacgagtatctgagtactacagttagatccaacattaatcaaccttggatcaaaaccatctctaagaggatgagagttgatatcattaatcactctatagtaacgcgtggaaaaagctctatattacaaactatagaaattatttttactaatagaacatgtgtgaaaatattcaaggattctactatgcacattattctatccaaggacaaggatgaaaaggggtgtatacacatgattgacaaattattctatgtctattataatttatttctgttgttcgaagatatcatccaaaacgagtactttaaagaagtagctaatgttgtaaaccacgtactcacggctacggcattagatgagaaattattcctaattaagaaaatggctgaacacgatgtttatggagttagcaatttcaaaatagggatgtttaacctgacatttattaagtcgttggatcataccgttttcccctctctgttagatgaggatagcaaaataaagttttttaaggggaaaaagctcaatattgtagcattacgatctctggaggattgtataaattacgtgactaaatccgagaatatgatagaaatgatgaaggaaagatcgactattttaaatagcatagatatagaaacggaatcggtagatcgtctaaaagaattgcttctaaaatgaaaaaaaacactaattcagaaatggatcaacgactagggtataagtttttggtgcctgatcctaaagccggagttttttatagaccgttacatttccaatatgtatcgtattctaattttatattgcatcgattgcatgaaatcttgaccgtcaagcggccactcttatcgtttaagaataatacagaacgaattatgatagaaattagcaatgttaaagtgactcctccagattactcacctataatcgcgagtattaaaggtaagagttatgacgcattagccacgttcactgtaaatatctttaaagaggtaatgaccaaagagggtatatccatcactaaaataagtagttatgagggaaaagattctcatttgataaaaattccgctactaataggatacgggaataaaaatccacttgatacagccaagtatcttgttcctaatgtcataggtggagtctttatcaataaacaatctgtcgaaaaagtaggaattaatctagtagaaaagattacaacatggccaaaatttagggttgttaagccaaactcattcactttctcgttttcctccgtatcccctcctaatgtattaccgacaagatatcgccattacaagatatctctggatatatcacaattggaagcgttgaatatatcatcgacaaagacatttataacggtcaatattgttttgctgtctcaatatttatctagagtgagtctagaattcattagacgtagtttatcatacgatatgcctccagaagttgtctatctagtaaacgcgataatagatagtgctaaacgaattactgaatctattactgactttaatattgatacatacattaatgacctggtggaagctgaacacattaaacaaaaatctcagttaacgattaacgagttcaaatatgaaatgctgcataactttttacctcatatgaactatacacccgatcaactaaagggattttatatgatatctttactaagaaagtttctctactgtatcttccacacttctagatatccagatagagattcgatggtttgtcatcgcatcctaacgtacggcaaatattttgagacgttggcacatgatgaattagagaattacataggcaacatccgaaacgatatcatgaacaatcacaagaacagaggcacttacgcggtaaacattcatgtactaacaactcccggacttaatcacgcgttttctagcttattgagtggaaagttcaaaaagtcagacggtagttatcgaacacatcctcactattcatggatgcagaatatttctattcctaggagtgttggattttatccggatcaagtaaagatttcaaagatgttttctgtcagaaaataccatccaagtcaatatctttacttttgttcatcagacgttccggaaagaggtcctcaggtaggtttagtatctcaattgtctgtcttgagttccattacaaatatactaacgtctgagtatttggatttggaaaagaaaatttgtgagtatatcagatcatattataaagatgatataagttactttgaaacaggatttccaatcactatagaaaatgctctagtcgcatctcttaatccaaatatgatatgtgattttgtaactgactttagacgtagaaaacggatgggattcttcggtaacttggaggtaggtattactttagttagggatcacatgaatgaaattcgcattaatattggagcgggaagattagtcagaccattcttggttgtggataacggagagctcatgatggatgtgtgtccggagttagaaagcagattagacgacatgacattctctgacattcagaaagagtttccgcatgtcatcgaaatggtagatatagaacaatttacttttagtaacgtatgtgaatcggttcaaaaatttagaatgatgtcaaaggatgaaagaaagcaatacgatttatgtgactttcctgccgaatttagagatggatatgtagcatcttcactagtgggaatcaatcacaattctggacccagagctattcttggatgtgctcaagctaaacaagctatctcttgtctgagttcggatatacgaaataaaatagacaatggaattcatttgatgtatccagagaggccaatcgtgattagtaaggctttagaaacttcaaagattgcggctaattgcttcggccaacatgttactatagcattaatgtcgtacaaaggtatcaatcaagaggatggaattatcatcaaaaaacaatttattcagagaggcggtctcgatattgttacagccaagaaacatcaagtagaaattccattggaaaactttaataacaaagaaagagataggtctaacgcctattcaaaattagaaagtaatggattagttagactgaatgctttcttggaatccggagacgctatggcacgaaatatctcatcaagaactcttgaagatgattttgctagagataatcagattagctttgatgtttccgagaaatataccgatatgtacaaatctcgcgttgaacgagtacaagtagaacttactgacaaagttaaggtacgagtattaaccatgaaagaaagaagacccattctaggagacaaatttaccactagaacgagtcaaaagggaacagtcgcgtatgtcgcggatgaaacggaacttccatacgacgaaaatggtatcacaccagatgtcattattaattctacatccatcttctctagaaaaactatatctatgttgatagaggttattttaacagccgcatattctgctaagccgtacaacaataagggagaaaaccgacctgtctgttttcctagtagtaacgaaacatccatcgatacatatatgcaattcgctaaacaatgttatgagcattcaaatccgaaattgtccgatgaagaattatcggataaaatcttttgtgaaaagattctctatgatcctgaaacggataagccttatgcatccaaagtattttttggaccaatttattacttgcgtctgaggcatttaactcaggacaaggcaaccgttagatgtagaggtaaaaagacgaagctcattagacaggcgaatgagggacgaaaacgtggaggaggtatcaagttcggagaaatggagagagactgtttaatagcgcatggtgcagccaatactattacagaagttttgaaagattcggaagaagattatcaagatgtgtatgtttgtgaaaattgtggagacatagcagcacaaatcaagggtattaatacatgtcttagatgttcaaaacttaatctctctcctctcttaacaaaaattgataccacgcacgtatctaaagtatttcttactcaaatgaacgccagaggcgtaaaagtcaaattagatttcgaacgaaggcctccttcgttttataaaccattagataaagttgatctcaagccgtcttttctggtgtaatattctagtttggtagtagatacatatcaatatcatcaaattcgagatccgaattataaaatgggcgtggattgttaactatagaatcggacgtctgatattcgaaaatctgtggagtttcaggttttggtggaggtgtaactgctacttgggatactgaagtctgatattcagaaagctgtggatgttctggttcggcatccaccgatggtgtcacatcactaatcggttcggtaacgtctgtggatggaggtgctacttctacagaacctgtagcctcagttgtcaacggagatacatttttaatgcgagaaaatgtataatttggtaatggtttcttatgtggatctgaagaagaggtaagatatctactagaaagataccgatcacgttctagttctcttttgtagaacttaactttttctttctccgcatctagttgatattccaacctcttcacgttactacgttcagattccaattcacgttcgcatgggttacctccgcagtttttacgagcgatttcacgttcagccttcatgcgtctctccctctctctatcgagtttatcagagcagtctttctgaaggcgatcgaactccataaatttctccaacgctttgattgtttccatagatttccgaagttcagcttttaggactgtgattctttttctttcgaattcacagctggatgtacaaccgtttccattaccgccatctctaagtttcttttctagatcggcaacatttcatccccatgccttttacattcctcgagtctactgtcgtcgaaatatcgttccagctccttttcgacatcaataactttagcacgttgtctctcaagctctcttttgtagttatctgattccctggcacgtttaagatcttcatgcaattgagtcagctcttaacttcctctcttgcttcttcgtcatagtacgcgcaatcactgtgagatccattgttaccacgtctacactcggcgagctcgcgtttaagagattcaatttcccgtttgtattggtccatgtttccattgctaccaccattagatttacaggctgctagttgtcgttcgagatcagaaatacgggttttcttggaattgatttcgtcgatgtacttggcatcgaaacacttattaagttctttttccaattctacgattttatttctttcgcgagtcaattccctcctgtagtaactatctgttttgtcagattcacgctctctacgtagactttcttgcaagttactaatttgttccctagcacgtccgagtttagttttatatgctgaatagagttctgattcatcctttgagcagatctctagcgatcgtttaagattcctaattctagtctttagcctatttacctcctcagaagatgttccgttaccgttgcgtttacactcgttaagctgtctatcaagatccatgattctatctctaagacgttgcatctctctttccatatcagcattgctttcattattacgtctgcagtcactcaactgtctttcaatatctgagattctatctctaagacgtcgcatctctctctgtttcggcattggtttcattattacgtttacagtcgttcaactgtctttcaagatctgatattctagattggagtctgctaatctctgtagcattttcacggcattcactcagttgtctttcaagatctgaaattttagattggagtctgctaatctctgtaagatttcctcctccgctctcgatgcagtcggtcaacttattctctagttctctaatacgcgaacgcagtgcatcaacttcttgcgtgtcttcctggttgcgtgtacattcatcgagatctctaacgcgtcgtcgttcttcctcaagttctctgcgtactacagaaagcgtgtccttatcttgttgatatttagcaatttctgattctagagtactgattttgcttacgtagttactaatatttgtcttggccttatcaagatcctccttgtatttgtcgcattccttgatatccctacgaagtctggacagttcccattcgacattacgacgtttatcgatttcagctcggagatcgtcatcgcgttgttttagccacatacgactgagttcaagttctcgttgacaagatccatctacttttccattcctaatagtatccagttccttttctagttctgaacgcatttctcgttccctatcaagcgattctctcaattctcggatagtcttcttatcaatttctaataaatctgaaccatcatctgtcccattttgaatatccctgtgttctttgatctcttttgtaagtcggtcgattctttcggttttataaacagaatccctttccaaagtcctaatcttactgagtttatcactaagttctgcattcaattcggtgagttttctcttggcttcttccaactctgttttaaactctccactatttccgcattcttcctcgcatttatctaaccattcaattagtttattaataactagttggtaatcagcgattcctatagccgttcttgtaattgtgggaacataattaggatcttctaatggattgtatggcttgatagcatcatctttatcattattagggggatggacaaccttaattggttggtcctcatctcctccagtagcgtgtggttcttcaataccagtgttagtaataggcttaggcaaatgcttgtcgtacgcgggcacttcctcatccatcaagtatttataatcgggttctacttcagaatattcttttctaagagacgcgacttcgggagttagtagaagaactctgtttctgtatctatcaacgctggaatcaatactcaagttaaggatagcgaatacctcatcgtcatcatccgtatcttctgaaacaccatcatatgacatttcatgaagtctaacgtattgataaatagaatcagatttagtattaaacagatccttaacctttttagtaaacgcatatgtatattttagatctccagatttcataatatgatcacatgccttaaatgtcagtgcttccatgatataatctggaacactaatgggtgacgaaaaagatacagcaccatatgctacgttgataaataaatctgaaccactaagtagataatgattaatgttaaggaaaagaaaatattcagtgtataggtatgtcttggcgtcatatcttgtactaaacacgctaaacagtttgttaatgtgatcaatttccaatagattaattagagcagcgggaataccaacaaacatattaccacatccgtattttctatgaatatcacatatcatgttaaaaaatcttgatagaagagcgaatatctcgtctgacttaatgagtcgtagttcagcagcaacataagtcataactgtaaatagaacatactttcctgtagtgttgattctagactccacatcaacaccattattaaaaatagttttatatacatctttaatctgctctccgttaatcgtcgaacgttctagtatacggaaacactttgatttcttatctgtagttaatgacttagtgatatcacgaagaatattacgaattacatttcttgtttttcttgagagacctgattcagaactcaactcatcgttccatagtttttctacctcagtggcgaaatctttggagtgcttggtacatttttcaataaggttcgtgacctccatttattataaaaaatttattcaaaacttaactacaatcgggtaattataaaatcgtagatctcccatgtggcggaatactaccatctatcgcatgtggatggacagtaggtaatggccatgggaacagtaatgtttgcatatttatctttcttgccagtattactgcatattgtcccaatgtttcgatgtgatgttctaacctatcaactgccgctgtatcacaacaatagtgtccgatgaaattaagattatgatccaatgtgtttaatatatgattatcaagtcttatacgatccgcgtcttttttgacaggatcaggttcttctacaggaagaagtttcggcctcttatgatattcatgtctgggaaacggtggtctagggtgaggctccggtatcggagtgggttttggattataatcatcatcgtctatgacatcatcttcgacttcgatatttattttgctatcttgatgatgtcctgtatcagttgcattttcagcactcgactgaatattagcgcattcattgtctattattaccatatttctaaacccaaaatgtatgtgttgaacatcagtactatcgttgatgagtcttatagcatgaattcgcttatcgttatcgggtttatcttctgtcaccttagcaattccttttttattaaactctacataatcatatccatttctattgtttgttctaatataaacgagtatagcatcattgctaaatttttcaatagtatcaaaaacagaatatcctaaaccatataatatatattcaggaacactcaaactaaatgtccaggattctcctaaatacgtaaactttaatagtgcgaaatcattcaaaaatctaccacttatagatagatagtacataaatgcgtatagtagtctacctatctctttattatgaaaaccggcattacgatcatatatgtcgtgatatacctgtgatccgtttacgttaaaccataaatacatgggtgatcctataaacatgaatttatttctaattctcagagctatagttaattgaccgtgtaatatttgcttacatgcatacttgatacgcttattaataagatttttatcattgctcgttatttcagaatcgtatatataaggagtaccatcgtgattcttaccagatattatacaaaatactatatataaaatatattgacccacgttagtaatcatataaatgtttaacgttttaaattttgtattcaatgatccattatcatacgctatcatggtcttgtaatattcattctttaaaatataatattgtgttagccattgcattggggctcctaatggagattttttattctcatccattttaggataggctttcataaagtccctaataacttcgtgaataatgtttctatgttttctactgatgcatgtatttgcttcgatttttttatcccatgtttcatctatcatagatttaaacgcagtaatgctcgcaacattaacatcttgaaccgttggtacaattccgttccataaatttataatgttcgccatttatataactcattttttgaatatacttttaattaacaaaagagttaagttactcatatggacgccgtccagtctgaacatcaatctttttagccagagatatcatagccgctcttagagtttcagcgtgattttccaacctaaatagaacttcatcgttgcgtttacaacacttttctatttgttcaaactttgttgttacattagtaatctttttttccaaattagttagccgttgtttgagagtttcctcattgtcgtcttcatcggctttaacaattgcttcgcgtttagcctctggctttttagcagcctttgtagaaaaaaattcagttgctggaattgcaagatcgtcatctccggggaaaagagttccgtccatttaaagtacagattttagaaactgacactctgcgttatttatatttggtacaacacatggattataaatattgatgttaataacatcagaaaatgtaaagtctatacattgttgcatcgtgttaaattttctaatggatctagtattattgggtccaacttctgcctgaaatccaaatatggaagcggatacaaaaccgtttcctggataaaccacacatctccacttttgctttacatcagaaattgtgtcgttgacatcttgaactctcctatctaatgccggtgttccacctatagattttgaatattcgaatgctgcatgagtagcattaaattccttaatattgccataattttcatatattgagtaaccctggataaaaagtaaacacaccgcagccgtcgctaccacaataaaaaaaattgatagagagttcatttataatctattagaagctgacaaaatttttttacacgcatcagacaatgctttaataaatagttcaacatctacttttgtcatatcgaaccgatggtatgattctaacctagaattacatccgaaaaagttgactatgttcatagtcattaagtcattaacaaacaacattccagactctggattataagacgatactgtttcgtcacaattacctaccttaatcatgtgattatgaatattggctattagagcaccttctaagaaatctataatatctttgaaacacgatttaaaatcaaaccacgaatatacttctacgaagaaagttagtttacccataggagaaataactataaatggagatctaaatacaaaatccggatctatgatagttttaacattattatattctctattaaatacctccacatctaaaaatgttaattttgaaactatgtcttcgtttattaccgtacctgaactaaacgctataagctctattgtttgagaactctttaaacgatattcttgaaatacatgtaacaaagtttcctttaactcggtcggtttatctaccatagttacagaatttgtatccttatctataatataataatcaaaatcgtataaagttatataattatcgcgttcagattgggatcttttcaaatagactaaaaaccccatttctctagtaagtatcttatgtatatgtttgtaaaatatcttcatggtgggaatatgctctaccgcagttagccattcctcattgacagcggtagatgtattagacaaaactattccaatgtttaacaagggccattttacgagattattaaatccttgtttgataaatgtagccaatgagggttcgagttcaacgacgattgaattctcttcccgcggatgctgcatgatgaacgacgggatgttgttcgattgatttggaattctttttcgactttttgtttatattaaatattttaaaatttatagcggatagcaattcatgtaccacggataatgtagacgcgtattgcgcatcgatatctttattattagataaatttatcaataaatgtgagaagtttgcctcgttaaggtcttccatttaaatattatataaacatttgtgtttgtaacttattcgtcttttatggaatagttttttactagtaaagctgcaattacacactttgtccgtaaaacataaatataaacaccagcttttatcaatcgttccaaaaagtcgacggcggacatttttaacatggcatctattttaaatacacttaggtttttggaaaaaacatcattttataattgtaacgattcaataactaaagaaaagattaagattaaacataagggaatgtcatttgtattttataagccaaagcattctaccgttgttaaatacttgtctggaggaggtatatatcatgatgatttggttgtattggggaaggtaacaattaataatctaaagatgatgctattttacatggatttatcatatcatggagtgacaagtagtggagcaatttacaaattgggatcgtctatcgatagactttctctaaataggactattgttacaaaagttaataattatgatgatacattttttgacgacgatgattgatcgctattgcacaattttgtttttgtactttctaatatagtgtttaggttctttttcatatgagaatattgatttactaaaatatctatgtttaacttttgttctatgacgtccttatcggcggtatcggtacatatacgtaattcaccttcacaaaatacggagtcttcgataataatagccaatcgattattggatctagctgtctgtatcatattcaacatgtttaatatatcctttcgtttcccctttacaggcatcgatcgtagcatattttccgcgtctgatatggaaatgttaaaactacaaaaatgcgtaatgttagcccgtcctaatattggtacgtgtctataagtttggcatagtagaataatagacgtgtttaaatgccttccaaagtttaagaattctattagagtattgcattttgatagtttatcgcctacatcatcaaaaataagtaaaaagtgtgctgattttttatgattttgtgcgacagcaatacatttttctatgttacttttagttcgtatcagattatattctagagattcctgactactaacgaaattaatatgatttggccaaatgtatccatcataatctgggttataaacgggtgtaaacaagaatatatgtttatattttttaactagtgtagaaaacagagatagtaaatagatagtttttccagatccagatcctcctgttaaaaccattctaaacggcatttttaataaattttctcttgaaaattgtttttcttggaaacaattcataattatatttacagttactaaattaatttgataataaatcaaaatatggaaaactaaggttgttagtagggaggagaacaaagaaggcacatcgtgatataaataacatttattatcatgatgacaccagaaaacgacgaagagcagacatctgtgttctccgctactgtttacggagacaaaattcagggaaagaataaacgcaaacgcgtgattggtctatgtattagaatatctatggttatttcactactatctatgattaccatgtccgcgtttctcatagtgcgcctaaatcaatgcatgtctgctaacgaggctgctattactgacgccgctgttgccgttgctgctgcatcatctactcatagaaaggttgcgtctagcactacacaatatgatcacaaagaaagctgtaatggtttatattaccagggttcttgttatatattacattcagactaccagttattctcggatgctaaagcaaattgcactgcggaatcatcaacactacccaataaatccgatgtcttgactacctggctcattgattatgttgaggatacatggggatctgatggtaatccaattacaaaaactacatccgattatcaagattctgatgtatcacaagaagttagaaagtatttttgtgttaaaacaatgaactaatatttatttttgtacattaataaatgaaatcgcttaatagacaaactgtaagtaggtttaagaagttgtcggtgccggccgctataatgatgatactctcaaccattattagtggcataggaacatttctgcattacaaagaagaactgatgcctagtgcttgcgccaatggatggatacaatacgataaacattgttatttagatactaacattaaaatgtctacagataatgcggtttatcagtgtcgtaaattacgagctagattgcctagacctgatactagacatctgagagtattgtttagtattttttataaagattattgggtaagtttaaaaaagaccaatgataaatggttagatattaataatgataaagatatagatattagtaaattaacaaattttaaacaactaaacagtacgacggatgctgaagcgtgttatatatacaagtctggaaaactggttaaaacagtatgtaaaagtactcaatctgtactatgtgttaaaaaattctacaagtgacaacaaaaaatgaattaataataagtcgttaacgtacgccgccatggacgccgcgtttgttattactccaatgggtgtgttgactataacagatacattgtatgatgatctcgatatctcaatcatggactttataggaccatacattataggtaacataaaaactgtccaaatagatgtacgggatataaaatattccgacatgcaaaaatgctactttagctataagggtaaaatagttcctcaggattctaatgatttggctagattcaacatttatagcatttgtgccgcatacagatcaaaaaataccatcatcatagcatgcgactatgatatcatgttagatatagaagataaacatcagccattttatctattcccatctattgatgtttttaacgctacaatcatagaagcgtataacctgtatacagctggagattatcatctaatcatcaatccttcagataatctgaaaatgaaattgtcgtttaattcttcattctgcatatcagacggcaatggatggatcataattgatgggaaatgcaatagtaattttttatcataaaagttgtaaagtaaataataaaacaataaatattgaactagtagtacgtatattgagcaatcagaaatgatgctggtacctcttatcacggtgaccgtagttgcgggaacaatattagtatgttatatattatatatttgtaggaaaaagatacgtactgtctataatgacaataaaattatcatgacaaaattaaaaaagataaagagttctaattccagcaaatctagtaaatcaactgatagcgaatcagactgggaggatcactgtagtgctatggaacaaaacaatgacgtagataatatttctaggaatgagatattggacgatgatagcttcgctggtagtttaatatgggataacgaatccaatgttatggcgcctagcacagaacacatttacgatagtgttgctggaagcacgctgctaataaataatgatcgtaatgaacagactatttatcagaacactacagtagtaattaatgaaacggagactgttgaagtacttaatgaagataccaaacagaatcctaactattcatccaatcctttcgtaaattataataaaaccagtatttgtagcaagtcaaatccgtttattacagaacttaacaataaatttagtgagaataatccgtttagacgagcacatagcgatgattatcttaataagcaagaacaagatcatgaacacgatgatatagaatcatcggtcgtatcattggtgtgattagtttcctttttataaaattgaagtaatatttagtattattgctgccgtcacgttgtacaaatggagatattccctgtattcggcatttctaaaattagcaattttattgctaataatgactgtagatattatatagatacagaacatcaaaaaattatatctgatgagatcaatagacagatggatgaaacggtacttcttaccaacatcttaagcgtagaagttgtaaatgacaatgagatgtaccatcttattcctcatagattatcgacgattatactctgtattagttctgtcggaggatgtgttatctctatagataatgacatcaatggcaaaaatattctaacctttcccattgatcatgctgtaatcatatccccactgagtaaatgtgtcgtagttagcaagggtcctacaaccatattggttgttaaagcggatatacctagcaaacgattggtaacatcgtttacaaacgacatactatatgtaaacaatctgtcactgattaattatttgccgttgtctgtattcattattagacgagtcaccgactatttggatagacacatatgcgatcagatatttgctaataataagtggtattcccttataaccatcgacgataagcaatatcctattccatcaaactgtataggtatgtcctctgccaagtacataaattctagcatcgagcaagatactttaatccatgtttgtaacctcgagcatccgttcgactcagtatacaaaaaaatgcagtcgtacaattctctacctatcaaggaacaaatattgtacggtagaattgataatataaatatgagcattagtatttctgtggattaatagatttctagtatggggatcattaatcatctctaatctctaaatacctcataaaacgaaaaaaaagctattatcaaatactgtacggaatggattcattctcttctctttttatgaaactctgttgtatatctactgataaaactggaagcaaaaaatctgatagaaagaataagaataagatcaaggattatatggaacacgattattataaaataacaatagttcctggttcctcttccacgtctactagctcgtggtattatacacatgcctagtaatagtctctttgcgttgacggaaagcagactagaaataacaggctaaaatgttcagacaccataatagttcccaacccagataataacagagttccatcaacacattcctttaaactcaatcccaaacccaaaaccgttaaaatgtatccggccaattgatagtagataatgaggtgtacagcgcatgataatttacacagtaaccaaaatgaaaatactttagtaattataagaaatatagacggtaatgtcatcatcaacaatccgataatatgcctgagagtaaacattgacggataaaacaaaaatgctccgcataactctatcatggcaataacacaaccaaatacttgtaagattcctaaattagtagaaaatacaacgaatatcgatgtataagtgatctcgagaaataataagaataaagtaatgcccgtaaagataaacatcaacattgtttggtaatcattaaaccaattagtatgaagttgaactaatttcacagtagattttattccagtgttatcctcgcatgtataagtacctggtaagatatctttatattccataatcaatgagacatcactatctgataacgaatgaagtctagcactagtatgccatttacttaatattgtcgtcttggaagttttattataagttaaaatatcatggttatccaatttccatctaatatactttgtcggattatctatagtacacggaataatgatggtatcattacatgctgtatactctatggtctttgtagttgttataacaaccaacgtatagaggtatatcaacgatattctaactcttgacattttttatttatttaaaatgatacctttgttatttattttattctattttgctaacggtattgaatggcataagtttgaaacgagtgaagaaataatttctacttacttattagacgacgtattatacacgggtgttaatggggcggtatacacattttcaaataataaactaaacaaaactggtttaactaataataattatataacaacatctataaaagtagaggatgcggataaggatacattagtatgcggaaccaataacggaaatcccaaatgttggaaaatagacggttcagacgacccaaaacatagaggtagaggatacgctccttatcaaaatagcaaagtaacgataatcagtcacaacggatgtgtactatctgacataaacatatcaaaagaaggaattaaacgatggagaagatttgacggaccatgtggttatgatttattcacggcggataacgtaattccaaaagatggtttacgaggagcattcgtcgataaagatggtacttatgacaaagtttacattcttttcactgatactatcggctcaaagagaattgtcaaaattccgtatatagcacaaatgtgcctaaacgacgaaggtggtccatcatcattgtctagtcatagatggtcgacgtttctcaaagtcgaattagaatgtgatatcgacggaagaagttatagacaaattattcattctagaactataaaaacagataatgatacgatactatatgtattcttcgatagtccttattccaagtccgcattatgtacctattctatgaataccattaaacaatctttttctacgtcaaaattggaaggatatacaaagcaattgccgtctccagctcctggtatatgtttaccagctggaaaagttgttccacataccacgtttgaagtcatagaacaatataatgtactagatgatattataaagcctttatctaaccaacctatcttcgaaggaccgtctggtgttaaatggttcgatataaaggagaaggaaaatgaacatcgggaatatagaatatacttcataaaagaaaattctatatattcgttcgatacaaaatctaaacaaactcgtagctcgcaagtcgatgcgcgactattttcagtaatggtaactgcgaaaccgttatttatagcagatatagggataggagtaggaatgccacaaatgaaaaaaatacttaaaatgtaatcttaatcgagtacaccacacgacaatgaacaaacataagacagattatgctggttatgcttgctgcgtaatatgcggtctaattgtcggaattatttttacagcgacactattaaaagttgtagaacgtaaattagttcatacaccattaatagataaaacgataaaagatgcatatattagagaagattgtcctactgactggataagctataataataaatgtatccatttatctactgatcgaaaaacctgggaggaaggacgtaatgcatgcaaagctctaaatccaaattcggatctaattaagatagagactccaaacgagttaagttttttaagaagccttagacgaggctattgggtaggagaatccgaaatattaaaccagacaaccccatataattttatagctaagaatgccacgaagaatggaactaaaaaacggaaatatatttgtagcacaacgaatactcccaaactgcattcgtgttacactatataacaattacactacatttttatcataccactacttcggttagatgttttagaaaaaaataaatatcgccgtaccgttcttgtttttataaaaataacaattaacaattatcaaattttttctttaatattttacgtggttgaccattcttggtggtaaaataatctcttagtgttggaatggaatgctgtttaatgtttccgcactcatcgtatattttgacgtatgcagtcacatcgtttacgcaatagtcagactgtagttctatcatgcttcctacatcagaaggaggaacagttttaaagtctcttggttttaatctattaccgttagttttcatgaaatcctttgttttatccacttcacattttaaataaatgtccactatacattcttttgttaattttactagatcgtcatgggtcatagaatttataggttccgtagtccatggatccaaactagcaaacttcgcgtatacggtatcgcgattagtgtatacaccaactgtatgaaaattaagaaaacagtttaataaatcaacagaaatatttaatcctccgtttgatacagatgcgccatatttatggatttcggattcacacgttgtttgtctgaggtgttcgtctagtgttgcttctacgtaaacttcgattcccatatattctttattgtcagaatcgcataccgatttatcatcatacactgtttgaaaactaaatggtatacacatcaaaataataaataataacgagtacattctgcaatattgttatcgtaattggaaaaatagtgttcgagtgagttggattatgtgagtattggattgtatattttattttatattttgtaataagaataaaatgctaatgtcaagtttattccaatagatgtcttattaaaaacatatataataaataacaatggctgaatggcataaaattatcgaggatatctcaaaaaataataagttcgaggatgccgccatcgttgattacaagactacaaagaatgttctagctgctattcctaacagaacatttgccaagattaatccgggtgaaattattcctctcatcactaatcgtaatattctaaaacctcttattggtcagaaatattgtattgtatatactaactctctaatggatgagaacacgtatgctatggagttgcttactgggtacgcccctgtatctccgatcgttatagcgagaactcataccgcacttatatttttgatgggtaagccaacaacatccagacgtgacgtgtatagaacgtgtagagatcacgctacccgtgtacgtgcaactggtaattaaaataaaaagtaatattcatatgtagtgtcaattttaaatgatgatgatgaaatggataatatccatattgacgatgtcaataatgccggtattggcatacagttcatcgatttttagatttcattcagaggatgtggaattatgttatgggcatttgtattttgataggatctataatgtagtaaatataaaatataatccgcatattccatatagatataattttattaatcacacgttaaccgtagatgaactagacgataatgtcttttttacacatggttattttttaaaacacaaatatggttcacttaatcctagtttgattgtctcattatcaggaaacttaaaatataatgatatacaatgctcagtaaatgtatcgtgtctcattaaaaatttggcaacgagtacatctactatattaacatctaaacataagacttattctctacatcggtccacgtgtattactataataggatacgattctattatatggtataaagatataaatgacaagtataatgacatctatgattttactgcaatatgtatgctaatagcgtctacattgatagtgaccatatacgtgtttaaaaaaataaaaatgaactcttaattatgctatgctattagaaatggataaaatcaaaattacggttgattcaaaaattggtaatgttgttaccatatcgtataacttggaaaagataactattgatgtcacacctaaaaagaaaaaagaaaaggatgtattattagcgcaatcagttgctgtcgaagaggcaaaagatgtcaaggtagaagaaaaaaatattatcgatattgaagatgacgatgatatggatgtagaaagcgcgtaatacgatctataaaaataagtatataaatactttttatttactgtactcttactgtgtagtggtgataccctactcgattatttttttaaaaaaaaaatacttattctgattcttctagccatttccgtgttcgtttgaatgccacatcgacgtcaaagataggggagtagttgaaatctagttctgcattgttggtacgcacctcaaatgtagtgttggatatcttcaacgtatagttgttgagtagtgatggttttctaaatagaattctcttcatatcattcttgcacgcgtacatttttagcatccatcttggaatcctagatccttgttctattcccaatggtttcatcaatagaagattaaacatatcgtacgaacacgatggagagtaatcgtagcaaaagtaagcatttcctttaatcttagatcccggatactggatatattttgcagccaacacgtgcatccatgcagcatttcctacatatacccggctatgcaccgcgtcatcatcgactgtacgatacataatgttaccgtgttgcttacattgctcgtaaaagactttcatcaatttgtctccttctccgtaaattccagtgggtcttaggcaacaagtatacaattttgctccattcatgattacggaattattggctttcataaccagttgctcggccatacgtttactttttgcgtatacatgtcctggtgatatatcataaagggtatgctcatggccgatgaatggatcaccgtgtttattgggtcctattgcttccatgctactagtatagatcaaatacttgattcctaggtccacacaagctgccaaaatagtctgtgttccataatagtttactttcatgatttcattatcggtgtattttccaaatacatccactagagcagccgtatgaataatcagatttaccccatctagcgcttctctcaccttatcaaagtcgtttatatcacattgtatatagtttataaccttaactttcgaggttattggttgtggatcttctacaatatctatgactctgatttcttgaacatcatctgcactaattaacagttttactatatacctgcctagaaatccggcaccaccagtaaccgcgtacacggccattgctgccactcataatatcagactacttattctattttactaaataatggctgtttgtataatagaccacgataatatcagaggagttatttactttgaaccagtccatggaaaagataaagttttaggatcagttattggattaaaatccggaacgtatagtttgataattcatcgttacggagatattagtcaaggatgtgattccataggcagtccagaaatatttatcggtaacatctttgtaaacagatatggtgtagcatatgtttatttagatacagatgtaaatatatttacaattattggaaaggcgttatctatttcaaaaaatgatcagagattagcgtgtggagttattggtatttcttacataaatgaaaagataatacattttcttacaattaacgagaatggcgtttgatatatcagttaatgcgtctaaaacaataaatgcattagtttacttttctactcagcaaaataaattagtcatacgtaatgaagttaatgatacacactacactgtcgaatttgatagggacaaagtagttgacacgtttatttcatataatagacataatgacaccatagagataagaggggtgcttccagaggaaactaatattggttgcgcggttagtatgacttacttgtataataagtatagttttaaactgattttagcagaatatataagacacagaaatactatatccggcaatatttattcggcattgatgacactagatgatttggctattaaacagtatggagacattgatctattatttaatgagaaacttaaagtagactccgattcgggactatttgactttgtcaactttgtaaaggatatgatatgttgtgattctagaatagtagtagctctatctagtctagtatctaaacattgggaattgacaaataaaaaatataggtgtatggcattagccgaacatatatctgatagtattccaatatctgagctatctagactacgatacaatctatgtaagtatctacgcggacacactgagagcatagaggataaatttgattattttgaagacgatgattcgtctacatgttctgccgtaaccgacagggaaacggatgtataattttttttatagcgtgaaggatatgataaaaaatataattgttgtatttatcccattccaatcaccttatatgattctgtaacacaataaaggagtcttatagatgtatagaggtcagatactggtttgataaactgtttattccacataagtatgtttgactttatggttagacccgcatactttaacaaatcactgaaaattggagttaggtattgacctctcagaatcagttgccgttctggaacattaaatgtattttttatgatatactccaacgcatttatgtgggcatacaacaagtcattactaatggaatattccaagagttttagttgtctagtatttaacaagagaagagatttcaacagactgtttatgaactcgaatgccgcctcattgtcgcttatattgatgatgtcgaattctcccaatatcatcaccgatgagtagctcatcttgttatcgggatccaagttttctaaagatgtcattaaaccctcgatcatgaatggatttatcatcatcgtttttatgttggacatgagcttagtccgtttgtccacatctatagaagatgatttctgaattatttcatatatctctctctttaactccaggaacttgtcaggatggtctactttaatatgttctcgtctaagagatgaaaatctttggatggttgcacgcgacttttctctaaaggatgacgttgcccaagatcctctcttaaatgaatccatcttatccttggacaagatggacagtctattttccttagatggtttaatatttttgttacccatgatctataaaggtagacctaatcgtctcggatgaccatatatttattttcagttttattatacgcataaattgtaaaaaatatgttaggtttacaaaaatgtctcgtggggcattaatcgtttttgaaggattggacaaatctggaaaaacaacacaatgtatgaacatcatggaatctataccggcaaacacgataaaatatcttaactttcctcagagatccactgtcactggaaaaatgatagatgactatctaactcgtaaaaaaacctataatgatcatatagttaatctattattttgtgcaaatagatgggagtttgcatcttttatacaagaacaactagaacagggaattactttaatagttgatagatacgcattttctggagtagcgtatgccgccgctaaaggcgcgtcaatgactctcagtaagagttatgaatctggattgcctaaacccgacttagttatattcttggaatctggtagcaaagaaattaatagaaacgtcggtgaggaaatttatgaagatgttacattccaacaaaaggtattacaagaatataaaaaaatgattgaagaaggagatattcattggcaaattatttcttctgaattcgaggaagatgtaaagaaggagttgattaagaatatagttatagaggctatacacacggttactggaccagtggggcaactgtggatgtaatagtgaaattacattttttataaatagatgttagtacagtgttataaatggatgaagcatattactctggcaacttggaatcagtactcggatacgtgtccgatatgcataccgaactcgtatcaatatctcaattagttattgccaagatagaaactatagataatgatatattaaacaaggacattgtaaattttatcatgtgtagatcaaacttggataatccatttatctctttcctagatactgtatatactattatagatcaagagatctatcagaccgaattgattaattcattagacgacaatgaaattatcgattgtatagttaataagtttatgagcttttataaggataacctagaaaatatagtagatgctatcattactctaaaatatataatgaataatccagattttaaaactacgtatgcagaagtactcggttccagaatagccgatatagatattaaacaagtgatacgtaagaatatactacaattgtctaataatatccgcgaacgatatttgtgaaaatattaaaaaaaaatactttttttattaaatgacgtcgcttcgcgaatttagaaaattatgctgtgatatatatcacgcatcaggatataaagaaaaatctaaattaattagagactttataacagatagggatgataaatatttgatcattaagctattgcttcccggattagacgatagaatttataacatgaacgataaacaaattataaaattatatagtataatatttaaacaatctcaggaagatatgctacaagatttaggatacggatatataggagacactattaggactttcttcaaagagaacacagaaatccgtccacgagataaaagcattttaactttagaagaagtggatagttttttaactacgttatcatccgtaactaaagaatcgcatcaaataaaattattgactgatgtagcatccgtttgtacatgtaatgatttaaaatgtgtagtcatgcttattgataaagatctaaaaattaaagcgggtcctcggtacgtacttaacgctattagtcctaatgcctatgatgtgtttagaaaatctaataacttgaaagagataatagaaaatgcatctaaacaaaatctagactctatatctatttctgttatgactccaattaatcccatgttagcggaatcgtgtgattctgtcaataaggcgtttaaaaaatttccatcaggaatgtttgcggaagtcaaatacgatggtgaaagagtacaagttcataaaaataataacgagtttgccttctttagtagaaacatgaaaccagtactctctcataaagtggattatctcaaagaatacataccgaaagcatttaaaaaagctacgtctatcgtattggattctgaaattgttcttgtagacgaacataatgtaccgctcccgtttggaagtttaggaatacacaaaaagaaagaatataaaaactctaacatgtgtttgttcgtgtttgactgtttgtactttgatggattcgatatgacggacattccattgtacgaacgaagatcttttctcaaagatgttatggttgaaatacccaatagaatagtattctcagagttgacgaatattagtaacgagtctcagttaactgacgtattggatgatgcactaacgagaaaattagaaggattggtcttaaaagatattaatggagtatacgaaccgggaaagagaagatggttaaaaataaagcgagactatttgaacgagggttccatggcagattctgccgatttagtagtactaggtgcttactatggtaaaggagcaaagggtggtatcatggcagtctttctaatgggttgttacgacgataaatccggtaaatggaagacggttaccaagtgttcaggacacgatgataatacgttaagggagttgcaagaccaattaaagatggttaaaattaacaaggatcccaaaaaaattccagagtggttggtagttaataaaatctatattcccgattttgtagtagaggatccaaaacaatctcagatatgggaaatttcaggagcagagtttacatcttccaagtcccataccgcaaatggaatatccattagatttcctagatttactaggataagagaggataaaacgtggaaagaatctactcatctaaacgatttagtaaacttgactaaatcttaatagttacatacaaactgaaaattaaaataacactatttagttggtggtcgccatggatggtgttattgtatactgtctaaacgcgctagtaaaacatggcgaggaaataaatcatataaaaaatgatttcatgattaaaccatgttgtgaaagagtttgtgaaaaagtcaagaacgttcacatcggcggacaatctaaaaacaatacagtgattgcagatttgccatatctggataatgcggtatccgatgtatgcaattcactgtataaaaagaatgtatcaagaatatccagatttgataaagatagatgacgatgacaagactcctactggtgtatataattattttaaacctaaagatgccattcctgttattatatccataggaaaggatagagatgtttgtgaactattaatctcatctgataaagcgtgtgcgtgtatagagttaaattcatataaagtagccattcttcccatggatgtttccttttttaccaaaggaaatgcatcattgattattctcctgtttgatttctctatcgatgcggcacctctcttaagaagtgtaaccgataataatgttattatatctagacaccagcgtctacatgacgagcttccgagttccaattggttcaagttttacataagtataaagtccgactattgttctatattatatatggttgttgatggatctgtgatgcatgcgatagctgataatagaactcacgcaattattagcaaaaatatattagacaatactacgattaacgatgagtgtagatgctgttattttgaaccacagattaggattcttgatagagatgagatgctcaatggatcatcgtgtgatatgaacagacattgtattatgatgtaggcaaatttggatctagtatgttggggaaatatgaacctgacatgattaagattgctctttcggtggctggtaatttaataagaaatcgagactacattcccgggagacgaggctatagcctctagataatttttttaagcacgaaataaaaaacataattttaaaccaatctatttcatactattttgtgtgatcaccatggacataaagatagatattagtatttctggtgataaatttacggtgactactaggagggaaaatgaagaaagaaaaaaatatctacctctccaaaaagaaaaaactactgatgttatcaaacctgattatcttgagtacgatgacttgttagatagagatgagatgtttactattctagaggaatattttatgtacagaggtctattaggcctcagaataaaatatggacgactctttaacgaaattaaaaaattcgacaatgatgcggaagaacaattcggtactatagaagaactcaagcagaaacttagattaaattctgaagagggagcagataactttatagattatataaaggtacaaaaacaggatatcgtcaaacttactgtatacgattgcatatctatgataggattgtgtgcatgcgtggtagatgtttggagaaatgagaaactgttttctagatggaaatattgtttacgagcgattaaactgtttattaatgatcacatgcttgataagataaaatctatactgcagaatagactagtatatgtggaaatgtcatagaaagttaaaagttaatgagagcaaaaatatataaggttgtattccatatttgttattttttctgtaatagttaaaaaatacattcgatggtctatctatcagattattatgtgttataaggtactttttctcataataaactagagtatgagtaagatagtgtttttcaaaacatataaatctaaaattgatggatgagatatacagctattaatttcgaaaatatattttaatctgataactttaaacatggatttttgatggtggtttaacgttttaaaaaaagattttgttattgtagtatatgataatattaaaagatggatataaagaatttgctgactgcatgtactattttttacattactacattggctacggcagatatacctacttcgtcactgccacacgctccggtaaacggggcatgtgacgagggagaatatcttgataagaggcataatcaatgttgtaatcagtgtccacctggagaatttgccaaggtcagatgtaatggtaacgataacacaaaatgtgaacgctgcccacctcatacatataccgcaatccccaattactctaatggatgtcatcaatgtagaaaatgcccaacaggatcatttgataaggtaaagtgtaccggaacacagaacagtaaatgttcgtgtcttcctggttggtattgcgctactgattcttcacagactgaagattgtcgagattgtataccaaaaaggagatgtccatgcggatactttggtggaatagatgaacaaggaaatcctatttgtaaatcgtgttgtgttggtgaatattgcgactacctacgtaattatagacttgatccatttcctccatgcaaactatctaaatgtaattaattatgattttgatgataatgttaccatacattatatcgctacttggttagtgtattattcagtatgaagacctattaataattacttatcttttgacgatcttgttataattataatataaaaacttatggcatagtaacttataattgctgacgcgataaattcgtaataatctgttttgttcaaaggaatctacaggcataaaaataaaaatataatttataatatactcttacagcgcgccatcatgaataacagcagtaaattaattgctgttattaatggatttagaaatagtggacgattttgtgatattaatatagttattaatgatgaaaggataaacgctcacagactcatcctatctggagcctccgaatatttttccattctgttttccaataattttatcgattctaatgaatacgaagttaatctaagtcatttagattatcaaagtgttaacgatttgatcgattacatttatgggatacctttgagcctaactaacgataacgtgaaatatattctttcaaccgctgattttttacaaattggatctgctattacggagtgtgaaaattacatacttaaaaatctttgttctagaaactgtatcgatttctacatatacgctgataaatataataacaagaaaatagaatcagcgtcgtttaacacaatattacaaaatattttgagactcatcaacgatgaaaactttaaatacttaacagaggaatcaatgataaaaattttaagcgatgatatgttaaatataaaaaatgaggatttcgccccactaattctcattaaatggttagagagtactcaacaaccatgcaccgtcgagttacttaaatgcctcagaatatcattgctttccccacaagttataaaatcactttatagtcatcgactggttagttcaatctacgaatgtataacattcttaaacaatatagcattcttggatgaatcatttcctagataccatagcatcgagttgatatctatcggtataagtaattcgcatgataagatttccataaactgctacaatcataaaaaaaatacatgggaaatgatatcttcacgtagatataggtgtagtttcgcagtggccgtcctggataatattatttatatgatgggtggatatgatcagtccccgtatagaagttcaaaggttatagcgtacaatacatgtacaaattcttggatatatgatataccagagctaaaatatcctcgttctaattgtgggggactggctgatgacgaatacatttattgtataggcggcatacgcgatcaggattcatcgttgacatctagtattgatagatggaagccatcaaaaccatattggcagaagtatgctaaaatgcgcgaaccaaaatgtgatatgggggttgcgatgttaaacggattaatatatgttataggtggaatcgttaaaggtgacacgtgtaccgacgcactagagagtttatcagaagatggatggatgaagcatcaacgtcttccaataaaaatgtccaatatgtcgacgattgttcatgatggcaagatttatatatctggaggttacaacaatagtagtgtagttaatgtaatatcgaatctagtccttagctataattcgatatatgatgaatggaccaaattatcatcattaaacattcctagaattaatcccgctctatggtcagcgcataataaattatatgtaggaggaggaatatctgatgatgttcgaactaatacatctgagacatacgacaaagaaaaagattgttggacattggataatggtcacgtgttaccacgcaattatataatgtataaatgcgaaccgattaaacataaatatccattggaaaaaacacagtacacgaatgattttctaaagtatttggaaagttttataggtagttgatagaacaaaatacataattttgtaaaaataaatcactttttatactaatatgacacgattaccaatacttttgttactaatatcattagtatactctacaccttttcctcagacatctaaaaaaataggtgatgatgcaactctatcatgtaatcgaaataatacaaatgactacgttgttatgagtgcttggtataaggagcccaattccattattcttttagctgctaaaagcgacgtcttgtattttgataattataccaaggataaaatatcttacgactctccatacgatgatctagttacaactatcacaattaaatcattgactgctagagatgccggtacttatgtatgtgcattctttatgacatcgcctacaaatgacactgataaagtagattatgaagaatactccacagagttgattgtaaatacagatagtgaatcgactatagacataatactatctggatctacacattcaccggaaactagttctgagaaacctgattatatagataattctaattgctcgtcggtattcgaaatcgcgactccggaaccaattactgataatgtagaagatcatacagacaccgtcacatacactagtgatagcattaatacagtaagtgcatcatctggagaatccacaacagacgagactccggaaccaattactgataaagaagaagatcatacagtcacagacactgtctcatacactacagtaagtacatcatctggaattgtcactactaaatcaaccaccgatgatacgtacaatgataatgatacagtaccatcaactactgtaggcggtagtacaacctctattagcaattataaaaccaaggactttgtagaaatatttggtattaccgcattaattatattgtcggccgtggcaatattctgtattacgtattatatatgtaataaacgttcacgtaaatacaaaacagagaacaaagtctagatttttgacttacataaatgtctgggatagtaaaatctatcatattgagcggaccatctggtttaggaaagacagccatagccaaaagactatgggaatatatttggatttgtggtgtcccataccactagatttcctcgtcctatggaacgagaaggtgtcgattaccattacgttaacagagaggccatctggaagggaatagccgccggaaactttctagaacatactgagtttttaggaaatatttacggaacttctaaaactgctgtgaatacagcggctattaataatcgtatttgtgtgatggatctaaacatcgatggcgttagaagtcttaaaaatacgtacctaatgccttactcggtgtatataagacctacctctcttaaaatggttgagaccaagcttcgttgtagaaacactgaagcggatgatgagattcatcgtcgtgtgatgttggcaaaaactgacatggatgaggcaggtgaagccggtctattcgacactattattattgaagatgatgtgaatttagcatatagtaagttaattcagatactacaggaccgtattagaatgtattttaacactaattagagacttaagacttaaaacttgataattaataatataactcgtttttatatgtggctatttcaacgtctaatgtattagttaaatattaaaacttaccacgtaaaacttaaaatttaaaatggtatttcattgacagatagatcacacattatgaactttcaaggacttgtgttaactgacaattgcaaaaatcaatgggtcgttggaccattaataggaaaaggtggattcggtagtatttatactactaatgacaataattatgtagtaaaaatagagcccaaagctaacggatcattatttaccgaacaggcattttatactagagtacttaaaccatccgttatcgaagaatggaaaaaatctcacaatataaagcacgtaggtcttatcacgtgcaaggcatttggtctatacaaatccattaatgtggaatatcgattcttggtaattaatagattaggtgcagatctagatgcggtgatcagagccaataataatagattaccaaaaaggtcggtgatgttgatcggaatcgaaatcttaaataccatacaatttatgcacgagcaaggatattctcacggagatattaaagcgagtaatatagtcttggatcaaatagataagaataaattatatctagtggattacggattggtttctaaattcatgtctaacggcgaacatgttccatttataagaaatccaaataaaatggataacggtactctagaatttacacctatagattcgcataaaggatacgttgtatctagacgtggagatctagaaacacttggatattgtatgattagatggttgggaggtatcttgccatggactaagatatctgaaacaaagaattgtgcattagtaagtgccacaaaacagaaatatgttaacaatactgcgactttgttaatgaccagtttgcaatatgaacctagagaattgctgcaatatattaccatggtaaactctttgacatattttgaggaacccaattacgacaagtttcggcacatattaatgcagggtgtatattattaagtgtggtgtttggtcgataaaaattaaaaaataacttaatttattattgatctcgtgtgtacaaccgaaatcatggcgatgttttacgcacacgctctcggtgggtacgacgagaatcttcatgcctttcctggaatatcatcgactgttgccaatgatgtcagaaaatattctgttgtgttagtttataataacaagtatgacattgtaaaagacaaatatatgtggtgttacagtcaggtgaacaagagatatattggagcactgctgcctatgtttgagtgcaatgaatatctacaaattggagatccgatccatgatcaagaaggaaatcaaatctctatcatcacatatcgccacaaaaactactatgctctaagcggaatcgggtacgagagtctagacttgtgtttggaaggagtagggattcatcatcacgtacttgaaacaggaaacgctgtatatggaaaagttcaacatgattattctactatcaaagagaaggccaaagaaatgaatgcacttagtccaggacctatcatcgattaccacgtctggataggagattgtatctgtcaagttactgctgtggacgtacatggaaaggaaattatgagaatgagattcaaaaagggtgcggtgcttccgatcccaaatctggtaaaagttaaacttggggagaatgatacagaaaatctttcttctactatatcggcggcaccatcgaggtaaccacctctctggaagacagcgtgaataatgtactcatgaaacgtttggaaactatacgccatatgtggtctgttgtatatgatcattttgatattgtgaatggtaaagaatgctgttatgtgcatacgcattcatctaatcaaaatcctataccgagtactgtaaaaacaaatttgtacatgaagactatgggatcatgcattcaaatggattccatggaagctctagagtatcttagcgaactgaaggaatcaggtggatggagtcccagaccagaaatgcaggaatttgaatatccagatggagtggaagacactgaatcaattgagagattggtagaggagttcttcaatagatcagaacttcaggctggtgaatcagtcaaatttggtaattctattaattgttaaacatacatctgtttcagctaagcaactaagaacacgtatacggcagcagcttccttctatactctcatcttttaccaacacaaagggtggatatttgttcattggagttgataataatacacacaaagtatttggattcacggtgggttacgactacctcagactgatagagaatgatatagaaaagcatatcaaaagactttgtgttgtgtatttctgtgagaagaaagaggacatcaagtacgcgtgtcgattcatcaaggtatataaacctggggatgaggctacctcgacatacgtgtgcgctatcaaagtggaaagatgctgttgtgctgtgtttgcagattggccagaatcatggtatatggatactaatggtatcaagaagtattctccagatgaatgggtgtcacatataaaattttaattaatgtaactatagagaacaaataataaggttgtaatatcatatagacaataactaacaattaattagtaactgttatctcttttttaattaaccaactaactatatacctattaatacatcgtaattatagttcttaacatctattaatcattaattcgcttctttaattttttataaactaacattgttaattgaaaagggataacatgttacagaatataaattatatatggatttttttaaaaaggaaatacttgactggagtatatatttatctcttcattatatagcacgcgtgttttccaatttttccacatcccatataatacaggattataatctcgttcgaacatacgagaaagtggataaaacaatagttgattttttatctaggttgccaaatttattccatattttagaatatggggaaaatattctacatatttattctatggatgatgctaatacgaatattataattttttttctagatagagtattaaatattaataagaacgggtcatttatacacaatctcgggttatcatcatccattaatataaaagaatatgtatatcaattagttaataatgatcatccagataataggataagactaatgcttgaaaatggacgtagaacaagacattttttgtcctatatatcagatacagttaatatctatatatgtattttaataaatcatggattttatatagatgccgaagacagttacggttgtacattattacatagatgtatatatcactataagaaatcagaatcagaatcatacaatgaattaattaagatattgttaaataatggatccgatgtagataaaaaagatacgtacggaaacacaccttttatcctattatgtaaacacgatatcaacaacgtggaattgtttgagatatgtttagagaatgctaatatagactctgtagactttaatagatatacacctcttcattatgtctcatgtcgtaataaatatgattttgtaaagttattaatttctaaaggagcaaatgttaatgcgcgtaataaattcggaactactccattttattgtggaattatacacggtatctcgcttataaaactatatttggaatcagacacagagttagaaatagataatgaacatatagttcgtcatttaataatttttgatgctgttgaatctttagattatctattatccagaggagttattgatattaactatcgtactatatacaacgaaacatctatttacgacgctgtcagttataatgcgtataatacgttggtctatctattaaacaaaaatggtgattttgagacgattactactagtggatgtacatgtatttcggaagcagtcgcaaacaacaacaaaataataatggaagtactattgtctaaacgaccatctttgaaaattatgatacagtctatgatagcaattactaaacataaacagcataatgcagatttattgaaaatgtgtataaaatatactgcgtgtatgaccgattatgatactcttatagatgtacagtcgctacagcaatataaatggtatattttaagatgtttcgatgaaatagatatcatgaagagatgttatataaaaaataaaactgtattccaattagttttttgtatcaaagacattaatactttaatgagatacggtaaacatccttctttcgtgaaatgcactagtctcgacgtatacggaagtcgtgtacgtaatatcatagcatctattagatatcgtcagagattaattagtctattatccaagaagctggatcctggagataaatggtcgtgttttcctaacgaaataaaatataaaatattggaaaactttaacgataacgaactatccacatatctaaaaatcttataaacattattaaaatataaaatctaagtaggataaaatcacactacatcattgtttccttttagtgctcgacagtgtatactatttttaacgctcataaataaaaatgaaaacgatttccgttgttacgttgttatgcgtactacctgctgttgtttattcaacatgtactgtacccactatgaataacgctaaattaacgtctaccgaaacatcgtttaatgataaccagaaagttacgtttacatgtgatcagggatatcattctttggatccaaatgctgtctgtgaaacagataaatggaaatacgaaaatccatgcaaaaaaatgtgcacagtttctgattatgtctctgaactatataataaaccgctatacgaagtgaattccaccatgacactaagttgcaacggcgaaacaaaatattttcgttgcgaagaaaaaaatggaaatacttcttggaatgatactgttacgtgtcctaatgcggaatgtcaacctcttcaattagaacacggatcgtgtcaaccagttaaagaaaaatactcatttggggaatatatgactatcaactgtgatgttggatatgaggttattggtgcttcgtacataagttgtacagctaattcttggaatgttattccatcatgtcaacaaaaatgtgatatgccgtctctatctaacggattaatttccggatctacattttctatcggtggcgttatacatcttagttgtaaaagtggttttacactaacggggtctccatcatccacatgtatcgacggtaaatggaatcccatactcccaatatgtgtacgaactaacgaaaaatttgatccagtggatgatggtcccgacgatgagacagatttgagcaaactctcgaaagacgttgtacaatatgaacaagaaatagaatcgttagaagcaacttatcatataatcatagtggcgttgacaattatgggcgtcatatttttaatctccgttatagtattagtttgttcctgtgacaaaaataatgaccaatataagttccataaattgctaccgtaaatataaatccgttaaaataattaataatttaataacaaacaagtatcaaaagattaaagacttatagctagaatcaattgagatgtcttcttcagtggatgttgatatctacgatgccgttagagcatttttactcaggcactattataacaagagatttattgtgtatggaagaagtaacgccatattacataatatatacaggctatttacaagatgcgccgttataccgttcgatgatatagtacgtactatgccaaatgaatcacgtgttaaacaatgggtgatggatacacttaatggtataatgatgaatgaacgcgatgtttctgtaagcgttggcaccggaatactattcatggaaatgtttttcgattacaataaaaatagtatcaacaatcaactaatgtatgatataattaatagcgtatctataattctagctaatgagagatatagaagcgcttttaacgacgatggtatatacatccgtagaaatatgattaacaagttgtacggatacgcatctctaactactattggcacgatcgctggaggtgtttgttattatctgttgatgcatctagttagtttgtataaataattatttcaatatactagttaaaattttaagattttaaatgtataaaaaactaataacgtttttatttgtaataggtgcattagcatcctattcgaataatgagtacactccgtttaataaactgagtgtaaaactctatatagatggagtagataatatagaaaattcatatactgatgataataatgaattggtgttaaattttaaagagtacacaatttctattattacagagtcatgcgacgtcggatttgattccatagatatagatgttataaacgactataaaattattgatatgtataccattgactcgtctactattcaacgcagaggtcacacgtgtagaatatctaccaaattatcatgccattatgataagtacccttatattcacaaatatgatggtgatgagcgacaatattctattactgcagagggaaaatgctataaaggaataaaatatgaaataagtatgatcaacgatgatactctattgagaaaacatactcttaaaattggatctacttatatatttgatcgtcatggacatagtaatacatattattcaaaatatgatttttaaaaatttaaaatatattatcacttcagtgacagtagtcaaataacaaacaacaccatgagatatattataattctcgcagttttgttcattaatagtatacatgctaaaataactagttataagtttgaatccgtcaattttgattccaaaattgaatggactggggatggtctatacaatatatcccttaaaaattatggcatcaagacgtggcaaacaatgtatacaaatgtaccagaaggaacatacgacatatccgcatttccaaagaatgatttcgtatctttctgggttaaatttgaacaaggcgattataaagtggaagagtattgtacgggactatgcgtcgaagtaaaaattggaccaccgactgtaacattgactgaatacgacgaccatatcaatttgtacatcgagcatccgtatgctactagaggtagcaaaaagattcctatttacaaacgcggtgacatgtgtgatatctacttgttgtatacggctaacttcacattcggagattctaaagaaccagtaccatatgatatcgatgactacgattgcacgtctacaggttgcagcatagactttgtcacaacagaaaaagtgtgcgtgacagcacagggagccacagaagggtttctcgaaaaaattactccatggagttcgaaagtatgtctgacacctaaaaagagtgtatatacatgcgcaattagatccaaagaagatgttcccaatttcaaggacaaaatggccagagttatcaagagaaaatttaatacacagtctcaatcttatttaactaaatttctcggtagcacatcaaatgatgttaccacttttcttagcatgcttaacttgactaaatattcataactaatttttattaatgatacaaaaacgaaataaaactgcatattatacactggttaacgcccttataggctctaaccattttcaagatgaggtccctgattatagtccttctgttcccctctatcatctactccatgtctattagacgatgtgagaagactgaagaggaaacatggggattgaaaatagggttgtgtataattgccaaagatttctatcccgaaagaactgattgcagtgttcatctcccaactgcaagtgaaggattgataactgaaggcaatggattcagggatatacgaaacaccgataaattataaaaaaagcaatgtgtccgctgtttccgttaataatactattttcgtaactggcggattattcataaataactctaatagcacgatcgtggttaacaatatggaaaaacttgacatttataaagacaaacaatggtcgattatagaaatgcctatggctagggtatatcacggcattgactcgacatttggaatgttatattttgccggaggtctatccgttaccgaacaatatggtaatttagagaaaaacaacgagatatcttgttacaatcctagaacgaataagtggtttgatatttcatatactatttataagatatccatatcatcattgtgtaaactaaataacgtcttctatgtatttagtaaggacattggatatgtggaaaagtatgatggtgcatggaagttagtacatgatcgtctccccgctataaaggcattatcaacttctccttattgattgaaaatgaaaatataaatagtttttatgtatagcagtattaccctatagttttattgcttactactaacatggatacagatgttacaaatgtagaagatatcataaatgaaatagatagagagaaagaagaaatactaaaaaatgtagaaattgaaaataataaaaacattaacaagaatcatcccaatgaatatattagagaagcactcgttattaataccagtagtaatagtgattccattgataaagaagttatagaatgtatcagtcacgatgtaggaatatagatcatatctactaatttttataatcgatacaaaacataaaaaacaactcgttattacatagcaggcatggaatccttcaagtattgttttgataacgatggcaagaaatggattatcggaaatactttatattctggtaattcaatactatataaggtcagaaaaaatttcactagttcgttctacaattacgtaatgaagatagatcacaaatcacacaagccattgttgtctgaaatacgattctatatatctgtattggatcctttgactatcgacaactggacacgggaacgtggtataaagtatttggctattccagatctgtatggaattggagaaaccgatgattatatgttcttcgttataaagaattcgggaagagtattcgccccaaaggatactgaatcagtcttcgaagcatgcgtcactatgataaacacgttagagtttatacactctcaaggatttacccatggaaaaatagaaccgaggaatatactgattagaaataaacgtctttcactaattgactattctagaactaacaaactatacaagagtggaaactcacatatagattacaacgaggacatgataacttcaggaaatatcaattatatgtgtgtagacaatcatcttggagcaacagtttcaagacgaggagatttagaaatgttgggatattgcatgatagaatggttcggtggcaaacttccatggaaaaacgaaagtagtataaaagtaataaaacaaaaaaaagaatataaaaaatttatagctactttctttgaggactgttttcctgaaggaaatgaacctctggaattagttagatatatagaattagtatacacgttagattattctcaaactcctaattatgacagactacgtaaactgtttatacaagattgaaattatattcttttttttatagagtgtggtagtgttacggatatctaatattaatattagactatctctatcgcgctacacgaccaatatcgattactatggatatcttctatgaaaggagagaatgtatttatttctccagcgtcaatctcgtcagtattgacaatactgtattatggagctaatggatccactgctgaacagctatcaaaatatgtagaaacggaggagaacacggataaggttagcgctcagaatatctcattcaaatccatgaataaagtatatgggcgatattctgccgtgtttaaagattcctttttgagaaaaattggcgataagtttcaaactgttgacttcactgattgtcgcactatagatgcaatcaacaagtgtgtagatatctttactgaggggaaaatcaatccactattggatgaaccattgtctcctagcaattagtgccgtatactttaaagcaaaatggttgacgccattcgaaaaggaatttaccagtgattatcccttttacgtatctccgacggaaatggtagacgtaagtatgatgtctatgtacggcaaggcatttaatcacgcatctgtaaaagaatcattcggcaacttttcaatcatagaactgccatatgttggagatactagtatgatggtcattcttccagacaagattgatggattagaatccatagaacaaaatctaacagatacaaattttaagaaatggtgtgactttatggatgctatgtttatagatgttcacattcccaagtttaaggtaacaggctcgtataatctggtggatactctagtaaagtcaggactgacagaggtgttcggttcaactggagattatagcaatatgtgtaatttagatgtgagtgtcgacgctatgatccacaaaacgtatatagatgtcaatgaagagtatacagaagcagctgcagcaacttctgtactagtggcagactgtgcatcaacaattacaaatgagttctgtgcagatcatccgttcatctatgtgattaggcatgttgatggaaaaattcttttcgttggtagatattgctctccgacaactaattgttaaccattttttttaaaaaaaatagaaaaaacatgtggtattagtgcaggtcgttgttcttccaattgcaattggtaagatgacggccaactttagtacccacgtcttttcaccacagcactgtggatgtgacagactgaccagtattgatgacgtcaaacaatgtttgactgaatatatttattggtcgtcctatgcataccgcaacaggcaatgcgctggacaattgtattccacactcctctcttttagagatgatgcggaattagtgttcatcgacattcgcgagctggtaaaaaatatgccgtgggatgatgtcaaagattgtacagaaatcatccgttgttatataccggatgagcaaaaaaccatcagagagatttcggccatcatcggactttgtgcatatgctgctacttactggggaggtgaagaccatcccactagtaacagtctgaacgcattgtttgtgatgcttgagatgctaaattacgtggattataacatcatattccggcgtatgaattgatgagttgtacatcttgacattttctttcttctcttctccctttcttctcttctcccttcctccctcttctccctttcccagaaacaaacttttttacccactataaaataaaatgagtatactacctgttatatttctttctatatttttttattcttcattcgttcagacttttaacgcgcctgaatgtatcgacaaagggcaatattttgcatcattcatggagttagaaaacgagccagtaatcttaccatgtcctcaaataaatacgctatcatccggatataatatattagatattttatgggaaaaacgaggagcggataatgatagaattataccgatagataatggtagcaatatgctaattctgaacccgacacaatcagactctggtatttatatatgcattaccacgaacgaaacctactgtgacatgatgtcgttaaatttgacaatcgtgtctgtctcagaatcaaatatagattttatctcgtatccacaaatagtaaatgagagatctactggcgaaatggtatgtcccaatattaatgcatttattgctagtaacgtaaacgcagatattatatggagcggacatcgacgccttagaaataagagacttaaacaacggacacctggaattattaccatagaagatgttagaaaaaatgatgctggttattatacatgtgttttagaatatatatacggtggcaaaacatataacgtaaccagaattgtaaaattagaggtacgggataaaataataccttctactatgcaattaccagatggcattgtaacttcaataggtagtaatttgactattgcatcgttgagacctcccacaacggatgcagacgtcttttggataagtaatggtatgtattacgaagaagatgatggggacggaaacggtagaataagtgtagcaaataaaatctatatgaccgataagagacgtgttattacatcccggttaaacattaatcctgtcaaggaagaagatgctacaacgtttacgtgtatggcgtttactattcctagcatcagcaaaacagttactgttagtataacgtgaatgtatgttgttacatttccatgtcaattgagtttataagaatttttatacattatcttccaacaaacaattgacgaacgtattgctatgattaactcccacgatactatgcatattattaatcattaacttgcagactatacctagtgctattttgacatactcatgttcttgtgtaattgcggtatctatattattaaagtacgtaaatctagctatagttttattatttaattttagataatataccgtctccttatttttaaaaattgccacatcctttattaaatcatgaatgggaatttctatgtcatcgttagtatattgtgaacaacaagagcagatatctataggaaagggtggaatgcgatacattgatctatgtagttttaaaacacacgcgaactttgaagaatttatataaatcattccatcgatacatccttctatgttgagatgtatatatccaggaattcgtttattaatatcgggaaatgtataaactaaaacattgcccgaaagcggtgcctctatctgcgttatatccgttcttaacttacaaaatgtaaccaatacctttgcatgacttgttttgttcggcaacgttagtttaaacttgacgaatggattaattacaatagcatgatccgcgcatctattaagtttttttactttaacgcccttgtatgtttttacagagactttatctaaatttctagtgcttgtatgtgttataaatataacgggatatagaaccgaatcacctaccttagatacccaattacattttatcagatccagataataaacaaattttgtcgccctaactaattctatattgttatatattttacaattggttatgatatcatgtaataacttggagtctaacgcgcatcgtcgtacgtttatacaattgtgatttagtgtagtatatctacacatgtatttttccgcactatagtattctggactagtgataaaactatcgttatatctatcttcaatgaactcatcgagatattgctctctgtcatattcatacacctgcataaactttctagacatcttacaatccgtgttattttaggatcatatttacatatttacgggtatatcaaagatgttagattagttaatgggaatcgtctataataatgaatattaaacaattatatgaggacttttaccacaaagcatcataaaaatgagtcgtcgtctgatttatgttttaaatatcaaccgcaaatcaactcataaaatacaagagaatgaaatatatacatattttagtcattgcaatatagaccatacttctacagaacttgattttgtagttaaaaactatgatctaaacagacgacaacctgtaactgggtatactgcactacactgctatttgtataataattactttacaaacgatgtactgaagatattattaaatcatggagtggatgtaacgatgaaaaccagtagcggacgtatgcctgtttatatattgcttactagatgttgtaatatttcacatgatgtagtgatagatatgatagacaaagataaaaaccacttattacatagagactattccaacctattactagagtatataaaatctcgttacatgttattaaaggaagaggatatcgatgagaacatagtatccactttattagataagggaatcgatcctaactttaaacaagacggatatacagcgttacattattattatttgtgtctcgcacacgtttataaaccaggtgagtgtagaaaaccgataacgataaaaaaggccaagcgaattatttctttgtttatacaacatggagctaatctaaacgcgttagataattgtggtaatacaccattccatttgtatcttagtattgaaatgtgtaataatattcatatgactaaaatgctgttgacttttaatccgaatttcgaaatatgtaataatcatggattaacgcctatactatgttatataacttccgactacatacaacacgatattcttgttatgttaatacatcactatgaaacaaatgttggagaaatgccgatagatgagcgtcgtatgatcgtattcgagtttatcaaaacatattctacacgtccggcagattcgataacttatttgatgaataggtttaaaaatataaatatttatacccgctatgaaggaaagacattattacacgtagcatgtgaatataataatacacacgtaatagattatcttatacgtatcaacggagatataaatgcgttaaccgacaataacaaacacgctacacaactcattatagataacaaagaaaattccccatataccattaattgtttactgtatatacttagatatattgtagataagaatgtgataagatcgttggtggatcaacttccatctctacctatcttcgatataaaatcatttgagaaattcatatcctactgtatacttttagatgacacattttacgataggcacgttaagaatcgcgattctaaaacgtatcgatacgcattttcaaaatacatgtcgtttgataaatacgatggtataataactaaatgtcacgacgaaacaatgttactcaaactgtccactgttctagacactacactatatgcagttttaagatgtcataattcgagaaagttaagaagatacctcaacgagttaaaaaaatataataacgataagtcctttaaaatatattctaatattatgaatgagagataccttaatgtatattataaagatatgtacgtgtcaaaggtatatgataaactatttcctgttttcacagataaaaattgtctactaacattactaccttcagaaattatatacgaaatattatacatgctgacaattaacgatctttataatatatcgtatccacctaccaaagtatagttgtatttttctcatgcgatgtgtgtaaaaaaactgatattatataaatattttagtgccgtataataaagatgacgatgaaaatgatggtacatatatatttcgtatcattattgttattgctattccacagttacgccatagacatcgaaaatgaaatcacagaattcttcaataaaatgagagatactctaccagctaaagactctaaatggttgaatccagcatgtatgttcggaggcacaatgaatgatatagccgctctaggagagccattcagcgcaaagtgtcctcctattgaagacagtcttttatcgcacagatataaagactatgtggttaaatgggagaggctagaaaagaatagacggcgacaggtttctaataaacgtgttaaacatggtgatttatggatagccaactatacatctaaattcagtaaccgtaggtatttgtgcaccgtaactacaaagaatggtgactgtgttcagggtatagttagatctcatattaaaaaacctccttcatgcattccaaaaacatatgaactaggtactcatgataagtatggcatagacttatactgtggaattctttacgcaaaacattataataatataacttggtataaagataataaggaaattaatatcgacgacattaagtattcacaaacgggaaaggaattaattattcataatccagagttagaagatagcggaagatacgactgttacgttcattacgacgacgttagaatcaagaatgatatcgtagtatcaagatgtaaaatacttacggttataccgtcacaagaccacaggtttaaactaatactagatccgaaaatcaacgtaacgataggagaacctgccaatataacatgcactgctgtgtcaacgtcattattgatcgacgatgtactgattgaatgggaaaatccatccggatggcttataggattcgattttgatgtatactctgttttaactagtagaggcggtatcaccgaggcgaccttgtactttgaaaatgttactgaagaatatataggtaatacatataaatgtcgtggacacaactattattttgaaaaaacccttacaactacagtagtattggagtaaatacacaatgcatttttatatacattactgaattattattactgaattattattactgaattattattaattatatcgtatttgtgctatagaatggatgaagatacgcgactatctaggtatttgtatctcaccgatagagaacatataaatgtagactctattaaacagttgtgtaaaatatcagatcctaatgcatgttatagatgtggatgtacggctttacatgagtacttttataattatagatcagtcaacggaaaatacaagtatagatacaacggttactatcaatattattcatctagcgattatgaaaattataatgaatattattatgatagaactggtatgaacagtgagagtgataatatatcaatcaaaacagaatatgaattctatgatgaaacacaagatcaaagtacacaactagtaggttacgacattaaactcaaaaccaatgaggatgattttatggctatgatagatcagtgggtgtccatgattatatagatgaatcaattaataaagtagtatatggaagagagtctcacgtaagatggcgggatatatggcaagaacataatgatggcgtatacagtataggaaaggagtgcatagataatatatacgaagacaaccataccgtagacgaattctacaagatagacagcgtatcagatgtagatgacgcggaacacatatctcctataactaatgatgtatctacacaaacatgggaaaagaaatcagagttagatagatacatggaatcgtatcctcgtcatagatatagtaaacattctgtatttaagggattttctgataaagttagaaaaaatgatttagacatgaatgtggtaaaagaattactttctaacggtgcatctctaacaatcaaggatagcagtaataaggatccaattgctgtttattttagaagaacgataatgaatttagaaatgattgatattattaacaaacatacaactattgatgaacgaaagtatatagtacactcctatctaaaaaattatagaaatttcgattatccatttttcaggaagttagttttgactaataaacattgtctcaacaattattataatataagcgacagcaaatatggaacaccgctacatatattggcgtctaataaaaaattaataactcctaattacatgaagttattagtgtataacggaaatgatataaacgcacgaggtgaagatacacaaatgcgaaccaactcagaaatggttgttgtattattgggtgtataggtattattagctatgtaccaatttaccaaccctcttaatattgattgataatcacatcggttatccaatcaataactaaattgtagtgtatatatagaccatatatgtttctatttttttgacagttacgtatagtttcagtaagttttgattgttgtattcctgtatctctagataagttagtcatatagtcccttccggcgatacgttttttccaagcccgaaattgattagccaaatgtgtatttatttttgtgatattgatataatatttcggataatgcatactgttagtcttatatcatttggttcatctatgtattgtaatattgttacatgatctatagatgatgtattgattttggcaggatcgaattccatatccgcgactaaacagtgaaaaaaatgtaaatactttttaaattttaaattagtaaaacttttttttattttttatgattccaaaaatactgaatacaaagtcctaaattataaatatggagatcatactaccacaacttattattatgtatacaaggccggtgtaatagatagatatatataattctattacaccggcagacaattaccgaccggtatttgtcgttaccaacataccgtataatatgtaatatacaattccataacccattgacagttgttatacatcaaaattgcaattcttttgattacgatgttataagaatgtagttaattgatgtatgatgttaatgtgtcctctttcctcttataacatcgtaatcaaaaacttttttataatatatacctaataatgtgtcttaatagttctcgtgattcgtcaaacaatcattcttataaaatataataaagcaacgtaaaacacataaaaataagcgtaactaataagacaatggatatttacgacgataaaggtctacagactattaaactgtttaataatgaatttgattgtataaggaatgacatcagagaattatttaaacatgtaactgattccgatagtatacaacttccgatggaagacaattctgatattatagaaaatatcagaaaaatactatatagacgattaaaaaatgtagaatgtgttgacatcgataacacaataacttttatgaaatacgatccaaatgatgataataagcgtacgtgttctaattgggtacccttaactaataactatatggaatattgtctagtaatatatttggaaacaccgatatgtggaggcaaaataaaattataccaccctacaggaaatataaagtcggataaggatattatgtttgcaaagactctagactttaaatcaacgaaagtgttaactggacgtaaaacaattgccgttctagacatatccgtttcatataatagatcaatgactactattcactacaacgacgacgttgatatagatatacatactgataaaaatggaaaagagttatgttattgttatataacaatagatgatcattacttggttgatgtggaaactataggagttatagtcaatagatctggaaaatgtctgttagtaaataaccatctaggtataggtatcgttaaagataaacgtataagcgatagttttggagatgtatgtatggatacaatatttgacttttctgaagcacgagagttattttcattaactaatgatgataacaggaatatagcatgggacactgataaactagacgatgatacagatatatggactcccgtcacagaagatgattacaaatttctttctagactagtattgtatgcaaaatctcaatcggatactgtatttgactattatgttcttactggtgatacggaaccacccactgtattcattttcaaggtaactagattttactttaatatgccgaaataaaaaatttttgtataatatctagaggtagaggtattgtttagataaatacaaataacatagatacatcgcatacttagcatttttataaatatacataagacatacactttatacatttttgtaaaaatactcataaaaaaaatttataaaaattatggcacaaccatatcttgtataggtagtttagttcgtcgagtgaacctataaacagataatagacaacacataataatgcctactaatacaagcataataccgggagatgggatatatgacgttgtagtgtttgggttttctgaacgttgatagtctactaatactacatgctgacatctaatgcctgtataaccatgagagcatctacaatacataccgtcaatatctctagcgtggatacagtcaccgtgtaaacaatatccatctccctctggaccgcataatctgatagctggaatatctgttgtagcgtttgtaatttctggcaatgtcgtttcgatagcgttaccactatcggcgaatgatctgattatcatagcagcgaacaacaacatcagataatttatcaacatttttgatggattctgtgtttatgctgtttctcagtgtgtgtttatgacaagattgggaattttatattattaattcagtaatataaactaataatatattgttaattgtgtaaataatataaaaataacaatacaatattgaatgtgttgctgttaaaaatgtatgtgttaatataatagaataaaataaatgagtatgatcattttagataacgattgattttatcattaccgcttcattcttatattctttgcttacggaacctatatttagaaacatctactaacaattttttatgcttgcattattaatggtatgtaatatgattgattgtgtacgcaataccaatttgttaagtatgaatacggggtacaaacataaattgaaatttaacattatttatttatgatatatatcgttatcgttaggtctataccatggatatctttaaagaactaatcttaaaacaccctgatgaaaatgttttgatttctccagtttccattttatctactttatctattctaaatcatggagcagctggttctacagctgaacaactatcaaaatatatagagaatatgaatgagaatacacccgatgacaataatgatgacatggaggtagatattccgtattgtgcgacactagctaccgcaaataaaatatacggtagcgatagtatcgagttccacgcctccttcctacaaaaaataaaagacgattttcaaactgtaaactttaataatgctaaccaaacaaaggaactaatcaacgaatgggttaagacaatgacaaatggtaaaattaattccttattgactagtccgctatccattaatactcgtatgacagttgttagcgccgtccattttaaagcaatgtggaaatatccattttctaaacatcttacatatacagacaagttttatatttctaagaatatagttaccagcgttgatatgatggtgggtaccgagaataacttgcaatatgtacatattaatgaattattcggaggattctctattatcgatattccatacgagggaaactctagtatggtaattatactaccggacgacatagaaggtatatataacatagaaaaaaatataacagatgaaaaatttaaaaaatggtgtggtatgttatctactaaaagtatagacttgtatatgccaaagtttaaagtggaaatgacagaaccgtataatctggtaccgattttagaaaatttaggacttactaatatattcggatattatgcagattttagcaagatgtgtaatgaaactatcactgtagaaaaatttctacatacgacgtttatagatgttaatgaggagtatacagaagcatcggccgttacaggagtatttacgattaacttttcgatggtatatcgtacgaaggtctacataaaccatccattcatgtacatgattaaagacaccacaggacgtatactttttatagggaaatactgctatccgcaataaatataaacaaatagacttttataaagagtcttcaacgataagtatatcgacatactacttatgctgcgaaagattctgaacgagaacgactatctcaccctcttggatcatatccgcactgctaaatactaaatctccactacactttttatcatcttatgaggaatgattgccttcgtgaaataggaataattagcaccagaatagctatggattattgtggtagagagtgcactattctatgtcgtctactggatgaagatgtgacgtacaaaaaaataaaactagaaattgaaacgtgtcacaacttatcaaaacatatagatagacgaggaaacaatgcgctacattgttacgtctccaataaatgcgatacagacattaagattgttctctcgcggagtcgagagactttgtagaaacaacgaaggattaactccgctaggagtatacagtaagcatagatacgtcaaatctcagattgtgcatctactgatatccagctattcaaattcctctaacgaactcaagtcgaatataaatgatttcgatctgtattcggataatatcgacttacgtctgctaaaatacctaattgtggataaacggatacgtccgtccaagaatacgaattatgcaatcaatggtctcggattggtggatatatacgtaacgacgcctaatccgagaccagaagtattgctatggcttcttaaatcagaatgttacagcaccggttacgtatttcgtacctgtatgtacgacagtgatatgtgtaagaactctcttcattactatatatcgtctcatagagaatctcaatctctatccaaggatgtaattaaatgtttgatcgataacaatgtttccatccatggcagagacgaaggaggatctttacccatccaatactactggtctttctcaaccatagatatagagattgttaaattattattaataaaggatgtggacacgtgtagagtatacgacgtcagccctatattatctaaacaagcgatttagagtaaccccatataatgtagacatggaaatcgttaatcttcttattgagagacgtcatactcttgtcgacgtaatgcgtagtattacttcgtacgattccagagaatataaccactacatcatcgataacattctaaagagatttagacaacaggatgtacaagccatgttgataaactacttacattacggcgatatggtcgttcgatgcatgttagataacggacaacaactatcctctgcacgactactttgttaataataatctcgtcgatgtaaacgtcgtaaggtttatcgtggaaaatatggacacgcggctgtaaatcacgtatcgaacaatggccgtctatgtatgtacggtctgatattatcgagatttaataattgcgggtatcactgttatgaaaccatactgatagatgtatttgatatactaagcaagtacatggatgatatagatatgatcgataactctactatattacgcggtcgatgtcaataatatacaatttgcaaagcggttattggaatatggagcgagtgtcacgctcgataatcaatacggccatccagaaaagcagttaccaaagagaaaacaaaacgaagctagttgatttattactgagttaccatcccactctagagactatgattgacgcatttaatagagatatacgctatctatatcctgaaccattattcgcctgtatcagatacgccttaatcctagatgatgattttccttctaaagtaaagtatgatatcgccggtcgtcataaggaactaaagcgctatagagtagacattaatagaatgaagaatgtctacatatcaggcgtctccatgtttgatatattatttaaacgaagcaaacgccacaaattgagatacgcaaagaatccgacatcaaatggtacaaaaaagaactaacgtccatcattacagaaactgtaaagaacaatgagaggatcgactccatagtggacaacattaatacagacgataacttgatttcgaaattacccatggagatactttattactccattaaataatttatcatggagcgataatgtcctgtttcatttgtttccatgacatattacaaaatcgattccgtccaagatgataaaaacatttaccggcatcataaacacggagtttattttatatgtctcgcataaacattactaaaaaaatatattgttcggttttctttcacatctttaattatgaaaaagtaaatcattatgagatggacgagattgtacgcatcgttcgcgacagtatgtggtacatacctaacgtatttatggacgacggtaagaatgaaggtcacgtttctgtcaacaatgtctgtcatatgtattttacgttctttgatgtggatacatcgtctcatctgtttaagctagttattaaacactgcgatctgaataaacgaggtaactctccattacattgctatacgatgaatacacgatttaatccatctgtattaaagatattgttacaccacggcatgcgtaactttgatagcaaggatgaccactatcaatcgataacaagatctttgatatactaacggacaccattgatgactttagtaaatcatccgatctattgctgtgttatcttagatataaattcaatgggagcttaaactattacgttctgtacaaaggatccgaccctaattgcgccgacgaggatgaactcacttctcttcattactactgtaaacacatatccacgttctacgaaagcaattattacaagttaagtcacactaagatgcgagccgagaagcgattcatctacgcgataatagattatggagcaaacattaacgcggttacacacttaccttcaacagtataccaaacatagtcctcgtgtggtgtatgctcttttatctcgaggagccgatacgaggatacgtaataatcttgattgtacacccatcatggaacgattgtgcaacaggtcatattctcataatgttactcaattggcacgaacaaaaggaagaaggacaacatctactttatctattcataaaacataatcaaggatacactctcaatatactacggtatctattagataggttcgacattcagaaagacgaatactataataccgcctttcaaaattgtaacaacaatgttgcctcatacatcggatacgacatcaaccttccgactaaagacggtattcgacttggtgtttgaaaacagaaacatcatatacaaggcggatgttgtgaatgacatcatccaccacagactgaaagtatctctacctatgattaaatcgttgttctacaagatgtctctccctacgacgattactacgtaaaaaagatactagcctactgcctattaagggacgagtcattcgcggaactacatagtaaattctgtttaaacgaggactataaaagtgtatttatgaaaaatatatcattcgataagatagattccatcatcgtgacataagtcgccttaaagagattcgaatctccgacaccgacctgtatacggtatcacagctatcttaaagccatacattcagacagtcacatttcatttcccatgtacgacgatctcatagaacagtgccatctatcgatggagcgtaaaagtaaactcgtcgacaaagcactcaataaattagagtctaccatcggtcaatctagactatcgtatttgcctccggaaattatgcgcaatatcatctaaacagtatgttgtacggaaagaaccattacaaatattatccatgatagaaagaaaatatctatatgattggagaagtaggaaacaggaacaagacgacgattactacattattaaatcatgaagtccgtattatactcgtatatattgtttctctcatgtataataataaacggaagagatatagcaccgcatgcaccatccgatggaaagtgtaaagacaacgaatacaaacgccataatttgtgtccgggaacatacgcttccagattatgcgatagcaagactaacacacaatgtacgccgtgtggttcgggtaccttcacatctcgcaataatcatttacccgcttgtctaagttgtaacggaagacgcgatcgtgtaacacgactcacaatagaatctgtgaatgctctcccggatattattgtcttctcaaaggatcatccggatgcaaggcatgtgtttcccaaacaaaatgtagaataggatacggagtatccggagacgtcatctgttctccgtgtggtctcggaacatattctcacaccgtctcttccgcagataaatgcgaacccgtacccagtaatacctttaactatatcgatgtggaaattaacctgtatcccgtcaacgacacgtcgtgtactcggacgaccactaccggtctcagcgaatccatctcaacgtcggaactaactattactatgaatcataaagactgtaatcccgtctttcgtgatggatacttctccgttcttaataaggtagcgacttcaggtttctttacaggagaaaggtgtgcactctgaatttcgagattaaatgcaataacaaagattcttcctccaaacagttaacgaaagcaaagaatgatactatcatgccgcattcggagacagtaactctagtgggcgacatctatatactatatagtaataccaatactcaagactacgaaactgatacaatctcttatcatgtgggtaatgttctcgatgtcgatagccatatgcccggtagttgcgatatacataaactgatcactaattccaaacccacccactttttatagtaagtttttcacccataaataataaatacaataattaatttctcgtaaaagtagaaaatatattctaatttattgcacggtaaggaagtagaatcataaagaacagtactcaatcaatagcaattatgaaacaatatatcgtcctggcatgcatgtgcctggcggcagctgctatgcctgccagtcttcagcaatcatcctcatcctcctcctcgtgtacggaagaagaaaacaaacatcatatgggaatcgatgttattatcaaagtcacaaagcaagaccaaacaccgaccaatgataagatttgccaatccgtaacggaaattacagagtccgagtcagatccagatcccgaggtggaatcagaagatgattccacatcagtcgaggatgtagatcctcctaccacttattactccatcatcggtggaggtctgagaatgaactttggattcaccaaatgtcctcagattaaatccatctcagaatccgctgatggaaacacagtgaatgctagattgtccagcgtgtccccaggacaaggtaaggactctcccgcgatcactcatgaagaagctcttgctatgatcaaagactgtgaagtgtctatcgacatcagatgtagcgaagaagagaaagacagcgacatcaagacccatccagtactcgggtctaacatctctcataagaaagtgagttacgaagatatcatcggttcaacgatcgtcgatacaaaatgcgtcaagaatctagagtttagcgttcgtatcggagacatgtgcaaggaatcatctgaacttgaggtcaaggatggattcaagtatgtcgacggatcggcatctgaaggtgcaaccgatgatacttcactcatcgattcaacaaaactcaaagcgtgtgtctgaatcgataactctattcatctgaaattggatgagtagggttaatcgaacgattcagacacaccacgaattaaaaaagtgtaccggacactatattccggtttgcaaaacaaaaatgttcttaactacattcacaaaaagttacctctcgcgacttcttctttttctgtctcaatagtgtgatacgattatgacactattcctattcctattcctatttcctttcagagtatcacaaaaatattaaacctctttctgatggtctcataaaaaaagttttacaaaaatatttttattctctttctctctttgatggtctcataaaaaaagttttacaaaaatatttttattctctttctctctttgatggtctcataaaaaaagttttacaaaaatatttttattctctttctctctttgatggtctcataaaaaaagttttacaaaaatatttttattctctttctctctttgatggtctcataaaaaaagttttacaaaaatatttttattctctttctctctttgatggtctcataaaaaaagttttacaaaaatatttttattctctttctctctttgatggtctcataaaaaaagttttacaaaaatatttttattctctttctctctttgatggtctcataaaaaaagttttacaaaaatatttttattctctttctctctttgatggtctcataaaaaaagttttacaaaaatatttttattctctttctctctttgatggtctcataaaaaaagttttacaaaaatatttttattctctttctctctttgatggtctcataaaaaaagttttacaaaaatatttttattttctttctctctttgatggtctcataaaaaatattaaacctctttctgatggtgtcactaaaatatttttattctcattctcattttctctttctctcttcaatggagtcataaaatatttttattctctttctctcttcgatggtctcacaaaaatattaaacctctttctgatggtgtcactaaaatatttttattctcattctcattttctttttctctcttcaatggagtcataaaatatttttattctctttctctcttcgatggtctcacaaaaatattaaacctctttctgatggagtcgtaaaaaagttttatctctttctctcttcgatggtctcactaaaatattttttattctctttctgatgcatcaactatttcttaaacaataacgtccaacaacatatactcgtcgagcttatcaacatcccctatgcccatctaggttaccagacaattgtatatcataaaataatgtttataatttacacgttaaaatcatataataaaacgtagatcgtataatattttttggtatataaatgatctagtaaaatccatgtaggggatactgctcacattttttctttggtacaaaatttcacacaagtttttatacagacaaattcttgtccatatattttaaaacattgacttttgtactaagaaaaatatctagactaactatctc

SEQ ID NO: 38 - DNA, 187653 bp, Artificial Sequence
  LIVP 4.1.1
agaaagagaataaaaatatttttgtaaaactttttttatgagaccatcaaagagagaaagagaataaaaatatttttgtaaaactttttttatgagaccatcaaagagagaaagagaataaaaatatttttgtaaaactttttttatgagaccatcaaagagagaaagagaataaaaatatttttgtaaaactttttttatgagaccatcaaagagagaaagagaataaaaatatttttgtaaaactttttttatgagaccatcaaagagagaaagagaataaaaatatttttgtaaaactttttttatgagaccatcaaagagagaaagagaataaaaatatttttgtaaaactttttttatgagaccatcaaagagagaaagagaataaaaatatttttgtaaaactttttttatgagaccatcaaagagagaaagagaataaaaatatttttgtaaaactttttttatgagaccatcagaaagaggtttaatatttttgtgatactctgaaaggaaataggaataggaataggaatagtgtcataatcgtatcacactattgagacagaaaaagaagaagtcgcgagaggtaactttttgtgaatgtagttaagaacatttttgttttgcaaaccggaatatagtgtccggtacacttttttaattcgtggtgtgcctgaatcgttcgattaaccctactcatccaatttcagatgaatagagttatcgattcagacacacgctttgagttttgttgaatcgatgagtgaagtatcatcggttgcaccttcagatgccgatccgtcgacatacttgaatccatccttgacctcaagttcagatgattccttgcacatgtctccgatacgaacgctaaactctagattcttgacgcattttgtatcgacgatcgttgaaccgatgatatcttcgtaactcactttcttatgagagatgttagacccgagtactggatgggtcttgatgtcgctgtctttctcttcttcgctacatctgatgtcgatagacacttcacagtctttgatcatagcaagagcttcttcatgagtgatcgcgggagagtccttaccttgtcctggggacacgctggacaatctagcattcactgtgtttccatcagcggattctgagatggatttaatctgaggacatttggtgaatccaaagttcattctcagacctccaccgatgatggagtaataagtggtaggaggatctacatcctcgactgatgtggaatcatcttctgattccacctcgggatctggatctgactcggactctgtaatttccgttacggattggcaaatcttatcattggtcggtgtttggtcttgctttgtgactttgataataacatcgattcccatatgatgtttgttttcttcttccgtacacgaggaggaggatgaggatgattgctgaagactggcaggcatagcagctgccgccaggcacatgcatgccagtacgatatattgtttcataattgctattgattgagtactgttctttatgattctacttccttaccgtgcaataaattagaatatattttctacttttacgagaaattaattattgtatttattatttatgggtgaaaaacttactataaaaagtgggtgggtttggaattagtgatcagtttatgtatatcgcaactaccgggcatatggctatcgacatcgagaacattacccacatgataagagattgtatcagtttcgtagtcttgagtattggtattactatatagtatatagatgtcgcccactagagttactgtctccgaatgcggcatgatagtatcattctttgctttcgttaactgtttggaggaagaatctttgttattgcatttaatctcgaaattcagagtgcacacctttctcctgtaaagaaacctgaagtcgctaccttattaagaacggagaagtatccatcacgaaatacgggattacagtctttatgattcatagtaatagttagttccgacgttgagatggattcgctgagaccggtagtggtcgtccgagtacacgacgtgtcgttaactggatacaggttaatttccacatcgatatagttaaacgtatttctgggtacgggttcgcatttatctgcggaagagacggtgtgagaatatgttccgagaccacacggagaacagatgacgtctccggatactccgtatcctattccacattttgtttgggaaacacatgccttgcatccggatgatcctttgagaagacaataatatccgggagagcattcacagattctattgtgagtcgtgttacacgatcgcgtcttccgttacaacttagacaagcgggtaaatgattattgcgagatgtgaaggtacccgaaccacacggcgtacatcgtgtgttagtcttgctatcgcataatctggaagcgtatgttcccggacacagattatggcgtttgtattcgttgtctttacactttccatcggatggtgcatgcggtgctatatctcttccgtttattattatacatgagagaaacaatatatacgagtataatacggacttcataatttaataatgtagtaatcgttgtcttgttcctgtttcctacttctccaatcatggataatatttgtaatggttctttccgtacaacatactgtttagatgatattgcgcataatttccggaggcaaatacgatagtctagattggccatcgatggtagactctaatttattgagtgctttgtcgacgagtttcgatagatggcactgttctatgagatcgtcgtacatgggaaatgaaatgtgactgtctgaatgtatggctttaagatagctgtgataccgtatacaggtcggtgtcggagattcgaatctctttgaggcgacttatgtcacgatgatggaatctatcttatcgaatgatatatttttcataaatacacttttatagtcctcgtttaaacagaatttactatgtagttccgcgaatgactcgtcccttaataggcagtaggctagtatcttttttacgtagtaatcgtcgtagggagagacatcttgtagaacaacgatttaatcataggtagagatactttcagtctgtggtggatgatgtcattcacaacatccgccttgtatatgatgtttctgttttcaaacaccaagtcgaataccgtctttagtcggaaggttgatgtcgtatccgatgtatgaggcaacattgttgttacaattttgaaaggcggtattatagtattcgtctttctgaatgtcgaacctatctaatagataccgtagtatattgagagtgtatccttgattatgttttatgaatagataaagtagatgttgtccttcttccttttgttcgtgccaattgagtaacattatgagaatatgacctgttgcacaatcgttccatgatgggtgtacaatcaagattattacgtatcctcgtatcggctcctcgagataaaagagcatacaccacacgaggactatgtttggtatactgttgaaggtaagtgtgtaaccgcgttaatgtttgctccataatctattatcgcgtagatgaatcgcttctcggctcgcatcttagtgtgacttaacttgtaataattgctttcgtagaacgtggatatgtgtttacagtagtaatgaagagaagtgagttcatcctcgtcggcgcaattagggtcggatcctttgtacagaacgtaatagtttaagctcccattgaatttatatctaagataacacagcaatagatcggatgatttactaaagtcatcaatggtgtccgttagtatatcaaagatcttgttatcgattgatagtggtcatccttgctatcaaagttacgcatgccgtggtgtaacaatatctttaatacagatggattaaatcgtgtattcatcgtatagcaatgtaatggagagttacctcgtttattcagatcgcagtgtttaataactagcttaaacagatgagacgatgtatccacatcaaagaacgtaaaatacatatgacagacattgttgacagaaacgtgaccttcattcttaccgtcgtccataaatacgttaggtatgtaccacatactgtcgcgaacgatgcgtacaatctcgtccatctcataatgatttactttttcataattaaagatgtgaaagaaaaccgaacaatatatttttttagtaatgtttatgcgagacatataaaataaactccgtgtttatgatgccggtaaatgtttttatcatcttggacggaatcgattttgtaatatgtcatggaaacaaatgaaacaggacattatcgctccatgataaattatttaatggagtaataaagtatctccatgggtaatttcgaaatcaagttatcgtctgtattaatgttgtccactatggagtcgatcctctcattgttctttacagtttctgtaatgatggacgttagttcttttttgtaccatttgatgtcggattctttgcgtatctcaatctgtggcgtttgcttcgtttaaataatatatcaaacatggagacgcctgatatgtaggcattcttcattctattaatgtctactctatagcgctttagttccttatgacgaccggcgatatcatactttactttagaaggaaaatcatcatctaggattaaggcgtatctgatacatgccgataatggttcaggatatagatagcgtatatctctattaaatgcgtcaatcatagtctctagagtgggatggtaactcagtaataaatcaactatcctcgttttgttttctctttggtaactgcttttctggatggccgtattgattatcgagcgtgatgttgtgacactcgctccatattccaataaccgctttgcaaattgtatattattgacatcgaccgcgtaatatagtagagttatcgatcatatctatatcatccatgtacttgcttagtatatcaaatacatctatcagtatggtttcataacagtgatacccgcaattattaaatctcgataatatcagaccgtacatacatagacggccattgttcgatatgtgatttacagccgcgtgtccatattttccacgataaaccttacgacgtttacatcgacgagattattattaacaaagtagtcgtgtagaggatagttgttgtccgtcgtcttatccatggttgctccgttatctaacatgcattgaatgataggtatacttaccatatcgccgtaatgtaagtagtttatcaacatggcttgtacatcctgttgtctaaatctctttagaatgttatcgatgatgtagtggttatattctctggaatcgtacgaagtaatactacgcattacgtcgacaagagtatgacgtctctcaataagaagattaacgatttccatgtctacattatatggggttactctaaatcgcttgtttagataatacgcctctaatatagggctgacgtcgtatactctacacgtgtccacatcctttattaataataatttaacaatctctatatctatggttgagaaagaccagtagtattggatgggtaaagatcctccttcgtctctgccatggatggaaacattgttatcgatcaaacatttaattacatccttggatagagattgagattctctatgagacgatatatagtaatgaagagagttcttacacatatcactgtcgtacatacaggtacgaaatacgtaaccggtgctgtaacattctgatttaagaagccatagcaatacttctggtctcggattaggcgtcgttacgtatatatccaccaatccgagaccattgattgcataattcgtattcttggacggacgtatccgtttatccacaattaggtattttagcagacgtaagtcgatattatccgaatacagatcgaaatcatttatattcgacttgagttcgttagaggaatttgaatagctggatatcagtagatgcacaatctgagattttacgtatctatgcttactgtatactcctagcggagttaatccttcgttgtttctacaaagtctctcgactccgcgagagaacaatcttaatgtctgtatcgcatttattggagacgtaacaatgtagcgcattgtttcctcgtctatctatatgttttgataagttgtgacacgtttcaatttctagttttatttttttgtacgtcacatcttcatccagtagacgacatagaatagtgcactctaccacaataatccatagctattctggtgctaattattcctatttcacgaaggcaatcattcctcataagatgataaaaagtgtagtggagatttagtatttagcagtgcggatatgatccaagagggtgagatagtcgttctcgttcagaatctttcgcagcataagtagtatgtcgatatacttatcgttgaagactctttataaaagtctatttgtttatatttattgcggatagcagtatttccctataaaaagtatacgtcctgtggtgtctttaatcatgtacatgaatggatggtttatgtagaccttcgtacgatataccatcgaaaagttaatcgtaaatactcctgtaacggccgatgcttctgtatactcctcattaacatctataaacgtcgtatgtagaaatttttctacagtgatagtttcattacacatcttgctaaaatctgcataatatccgaatatattagtaagtcctaaattttctaaaatcggtaccagattatacggttctgtcatttccactttaaactttggcatatacaagtctatacttttagtagataacataccacaccattttttaaatttttcatctgttatatttttttctatgttatatataccttctatgtcgtccggtagtataattaccatactagagtttccctcgtatggaatatcgataatagagaatcctccgaataattcattaatatgtacatattgcaagttattctcggtacccaccatcatatcaacgctggtaactatattcttagaaatataaaacttgtctgtatatgtaagatgtttagaaaatggatatttccacattgctttaaaatggacggcgctaacaactgtcatacgagtattaatggatagcggactagtcaataaggaattaattttaccatttgtcattgtcttaacccattcgttgattagttcctttgtttggttagcattattaaagtttacagtttgaaaatcgtcttttattttttgtaggaaggaggcgtggaactcgatactatcgctaccgtatattttatttgcggtagctagtgtcgcacaatacggaatatctacctccatgtcatcattattgtcatcgggtgtattctcattcatattctctatatattttgatagttgttcagctgtagaaccagctgctccatgatttagaatagataaagtagataaaatggaaactggagaaatcaaaacattttcatcagggtgttttaagattagttctttaaagatatccatggtatagacctaacgataacgatatatatcataaataaataatgttaaatttcaatttatgtttgtaccccgtattcatacttaacaaattggtattgcgtacacaatcaatcatattacataccattaataatgcaagcataaaaaattgttagtagatgtttctaaatataggttccgtaagcaaagaatataagaatgaagcggtaatgataaaatcaatcgttatctaaaatgatcatactcatttattttattctattatattaacacatacatttttaacagcaacacattcaatattgtattgttatttttatattatttacacaattaacaatatattattagtttatattactgaattaataatataaaattcccaatcttgtcataaacacacactgagaaacagcataaacacagaatccatcaaaaatgttgataaattatctgatgttgttgttcgctgctatgataatcagatcattcgccgatagtggtaacgctatcgaaacgacattgccagaaattacaaacgctacaacagatattccagctatcagattatgcggtccagagggagatggatattgtttacacggtgactgtatccacgctagagatattgacggtatgtattgtagatgctctcatggttatacaggcattagatgtcagcatgtagtattagtagactatcaacgttcagaaaacccaaacactacaacgtcatatatcccatctcccggtattatgcttgtattagtaggcattattatgtgttgtctattatctgtttataggttcactcgacgaactaaactacctatacaagatatggttgtgccataatttttataaatttttttatgagtatttttacaaaaatgtataaagtgtatgtcttatgtatatttataaaaatgctaagtatgcgatgtatctatgttatttgtatttatctaaacaatacctctacctctagatattatacaaaaattttttatttcggcatattaaagtaaaatctagttaccttgaaaatgaatacagtgggtggttccgtatcaccagtaagaacataatagtcaaatacagtatccgattgagattttgcatacaatactagtctagaaagaaatttgtaatcatcttctgtgacgggagtccatatatctgtatcatcgtctagtttatcagtgtcccatgctatattcctgttatcatcattagttaatgaaaataactctcgtgcttcagaaaagtcaaatattgtatccatacatacatctccaaaactatcgcttatacgtttatctttaacgatacctatacctagatggttatttactaacagacattttccagatctattgactataactcctatagtttccacatcaaccaagtaatgatcatctattgttatataacaataacataactcttttccatttttatcagtatgtatatctatatcaacgtcgtcgttgtagtgaatagtagtcattgatctattatatgaaacggatatgtctagaacggcaattgttttacgtccagttaacactttcgttgatttaaagtctagagtctttgcaaacataatatccttatccgactttatatttcctgtagggtggtataattttattttgcctccacatatcggtgtttccaaatatattactagacaatattccatatagttattagttaagggtacccaattagaacacgtacgcttattatcatcatttggatcgtatttcataaaagttattgtgttatcgatgtcaacacattctacattttttaatcgtctatatagtatttttctgatattttctataatatcagaattgtcttccatcggaagttgtatactatcggaatcagttacatgtttaaataattctctgatgtcattccttatacaatcaaattcattattaaacagtttaatagtctgtagacctttatcgtcgtaaatatccattgtcttattagttacgcttatttttatgtgtttttacgttgctttattatattttataagaatgattgtttgacgaatcacgagaactattaagacacattattaggtatatattataaaaaagtttttgattacgatgttataagaggaaagaggacacattaacatcatacatcaattaactacattcttataacatcgtaatcaaaagaattgcaattttgatgtataacaactgtcaatgggttatggaattgtatattacatattatacggtatgttggtaacgacaaataccggtcggtaattgtctgccggtgtaatagaattatatatatctatctattacaccggccttgtatacataataataagttgtggtagtatgatctccatatttataatttaggactttgtattcagtatttttggaatcataaaaaataaaaaaaagttttactaatttaaaatttaaaaagtatttacatttttttcactgtttagtcgcggatatggaattcgatcctgccaaaatcaatacatcatctatagatcatgtaacaatattacaatacatagatgaaccaaatgatataagactaacagtatgcattatccgaaatattatatcaatatcacaaaaataaatacacatttggctaatcaatttcgggcttggaaaaaacgtatcgccggaagggactatatgactaacttatctagagatacaggaatacaacaatcaaaacttactgaaactatacgtaactgtcaaaaaaatagaaacatatatggtctatatatacactacaatttagttattaattggataaccgatgtgattatcaatcaatattaagagggttggtaaattggtacatagctaataatacctatacacccaataatacaacaaccatttctgagttggatatcatcaaaatactaaataaatacgaggacgtgtatagagtaagtaaagaaaaagaatgtggaatttgctatgaagttgtttactcaaaacgatagatactttggtttattggattcgtgtactcatatattttgcataacatgcatcaatatatggcatagaacacgaagagaaaccggtgcgtcggataattgtcctatatgccgtacccgttttagaaacataacaatgagcaagttctataagctagttaactaataaataaaaagtttaatttgttgacgacgtatgtcgttattttttctcgtataaaagattaatttgattctaatataatctttagtattggataaatatcaattcaaattaattccattagattatatcataaataaaaatagtagcacacaactacttcagccaaatattcttttttgaaacgccatctatcgtagtgaggacacaagtgaacctataattatcaaatttattagtatcggttacatgaaggactttacgtagagtgacgattccactatctgtggtacgaacggtttcatcttctttgatgccatcacccagatgttctataaacttggtatcctcgtccgatctcatatcctttgccaaccaatacatgtagctaaaattaggcataaatttcacacatcctgaacaatgaaattctccagaagatgttacaatgtctagatttggacatttggtttcaaccgcgttaacatatgagtgaacacacccatacatgaaagcgatgagaaataggattctcatcttgccaaaatatcactagaaaaaatttatttatcagttttaaaggtataaaaaatacttattgttgctcgaatattttgtatttgatggtatacggaagattagaaatgtaggtattatcatcaactgattctatggttttatgtattctatcatgtttcactattgcgttggaaataatatcatatgcttccacatatattttattttgttttaactcataatactcacgtaattctggattattggcatatctatgaataattttagctccatgatcagtaaatattaatgagaacatagtattaccacctaccattatttttttcatctcattcaattcttaattgcaaagatctatataatcattatagcgttgacttatggactctggaatcttagacgatgtacagtcatctataatcatggcatatttaatacattgttttatagcatagtcgttatctacgatgttagatatttctctcaatgaatcaatcacacaatctaatgtaggtttatgacataatagcattttcagcagttcaatgtttttagattcgttgatggcaatggctatacatgtatatccgttatttgatctaatgttgacatctgaaccggattctagcagtaaagatactagagattgtttattatatctaacagccttgtgaagaagtgtttctcctcgtttgtcaatcatgttaatgtctttaagataaggtaggcaaatgtttatagtactaagaattgggcaagcataagacatgtcacaaagacccttttttgtatgtataagtgtaaaaattataacatccatagttggatttacataggtgtccaatcgggatctctccatcatcgagataattgatggcatctcccttccttttttagtagatatttcatcgtgtaagaatcaatattaatatttctaaagtatccgtgtatagcctctttatttaccacagctccatattccactagagggatatcgccgaatgtcatatactcaattagtatatgttggaggacatccgagttcattgttttcaatatcaaagagatggtttccttatcatttctccatagtggtacaatactacacattattccgtgcggctttccattttccaaaaacaatttgaccaaatctaaatctacatctttattgtatctataatcactatttagataatcagccataattcctcgagtgcaacatgttagatcgtctatatatgaataagcagtgttatctattcctttcattaacaatttaacgatgtctatatctatatgagatgacttaatataatattgaagagctgtacaatagtttttatctataaaagacggcttgattccgtgattaattagacatttaacaacttccggacgcacatatgctctcgtatccgactctgaatacagatgagagatgatatacagatgcaatacggtaccgcaatttcgtagttgataatcatcatacgcgtatcagtactcgtcctcataaagaacactgcagccattttctatgaacaaatcaataattttagaaacaggatcattgtcattacataattttctataactgaacgatggttttcacatttaacactcaagtcaaatccatgttctaccaacacctttatcaagtcaacgtctacatttttggatttcatatagctgaatatattaaagttatttatgttgctaaatccagtggcttctagtagagccatcgctatatccttattaactttaacatgtctactatttgtgtattcttctaatggggtaagctgtctccaatttttgcgtaatggattagtgccactgtctagtagtagtttgacgacctcgacattattacaatgctcattaaaaaggtatgcgtgtaaagcattattcttgaattggttcctggtatcattaggatctctgtctttcaacatctgtttaagttcatcaagagccacctcctcattttccaaatagtcaaacattttgactgaatgagctactgtgaactctatacacccacacaactaatgtcattaaatatcatgtcaaaaacttgtacaattattaataaaaataatttagtgtttaaattttaccagttccagattttacacctccgttaatacctccattaaccccactggacgatcctcctccccacattccaccgccaccagatgtataagttttagatcctttattactaccatcatgtccatggataaagacactccacatgccgccactaccccctttagaagacatattaataagacttaaggacaagtttaacaataaaattaatcacgagtaccctactaccaacctacactattatatgattatagtttctatttttacagtaccttgactaaagtttctagtcacaagagcaatactaccaacctacactattatatgattatagtttctatttttataggaacgcgtacgagaaaatcaaatgtctaatttctaacggtagtgttgataaacgattgttatccgcggatacctcctctatcatgtcgtctattttcttactttgttctattaacttattagcattatatattatttgattataaaacttatattgcttattagcccaatctgtaaatatcggattattaacatatcgtttctttgtaggtttatttaacatgtacatcactgtaagcatgtccttaccatttattttaatttgacgcatatccgcaatttctttttcgcagtcggttataaattctatatatgatggatacatgctacatgtgtacttataatcgactaatatgaagtacttgatacatattttcagtaacgatttattattaccacctatgaataagtacctgtgatcgtctaggtaatcaactgttttcttaatacattcgatggttggtaatttactcagaataatttccaatatcttaatatataattctgctatttctgggatatatttatctgccagtataacacaaatagtaatacatgtaaacccatattttgttattatattaatgtctgcgccattatctattaaccattctactaggctgacactatgcgactcaatacaatgataaagtatactacatccatgtttatctattttgtttatatcatcaatatacggcttacaaagttttagtatcgataacacatccaactcacgcatagagaaggtagggaataatggcataatatttattaggttatcatcattgtcattatctacaactaagtttccattttttaaaatatactcgacaactttaggatctctattgccaaatttttgaaaatatttatttatatgcttaaatctatataatgtagctccttcatcaatcatacatttaataacattgatgtatactgtatgataagatacatattctaacaatagatcttgtatagaatctgtatatcttttaagaattgtggatattaggatattattacataaactattacacaattctaaaatataaaacgtatcacggtcgaataatagttgatcaactatataattatcgattttgtgatttttcttcctaaactgtttacgtaaatagttagatagaatattcattagttcatgaccactatagttactatcgaataacgcgtcaaatatttcccgtttaatatcgcatttgtcaagataataatagagtgtggtatgttcacgataagtataataacgcatctctttttcgtgtgaaattaaatagtttattacgtccaaagatgtagcataaccatcttgtgacctagtaataatataataatagagaactgttttacccattctatcatcataatcagtggtgtagtcgtaatcgtaatcgtctaattcatcatcccaattataatattcaccagcacgtctaatctgttctattttgatcttgtatccatactgtatgttgctacatgtaggtattcctttatccaataatagtttaaacacatctacattgggatttgatgttgtagcgtatttttctacaatattaataccatttttgatactatttatttctatacctttcgaaattagtaatttcaataagtctatattgatgttatcagaacatagatattcgaatatatcaaaatcattgatatttttatagtcgactgacgacaataacaaaatcacaacatcgtttttgatattattatttttcttggtaacgtatgcctttaatggagtttcaccatcatactcatataatggatttgcaccactttctatcaatgattgtgcactgctggcatcgatgttaaatgttttacaactatcatagagtatcttatcgttaaccatgattggttgttgatgctatcgcattttttggtttctttcatttcagttatgtatggatttagcacgtttgggaagcatgagctcatatgatttcagtactgtagtgtcagtactattagtttcaataagatcaatctctagatctatagaatcaaaacacgataggtcagaagataatgaatatctgtaggcttcttgttgtactgtaacttctggttttgttagatggttgcatcgtgctttaacgtcaatggtacaaattttatcctcgctttgtgtatcatattcgtccctactataaaattgtatattcagattatcatgcgatgtgtatacgctaacggtatcaataaacggagcacaccatttagtcataaccgtaatccaaaaatttttaaagtatatcttaacgaaagaagttgtgtcattgtctacggtgtatggtactagatcctcataagtgtatatatctagagtaatgtttaatttattaaatggttgataatatggatcctcgtgacaatttccgaagatggaaataagacataaacacgcaataaatctaattgcggacatggttactccttaaaaaaatacgaataatcaccttggctatttagtaagtgtcatttaacactatactcatattaatccatggactcataatctctatacgggattaacggatgttctatatacggggatgagtagttctcttctttaactttatactttttactaatcatatttagactgatgtatgggtaatagtgtttgaagagctcgttctcatcatcagaataaatcaatatctctgtttttttgttatacagatgtattacagcctcatatattacgtaatagaacgtgtcatctaccttattaactttcaccgcatagttgtttgcaaatacggttaatcctttgacctcgtcgatttccgaccaatctgggcgtataatgaatctaaactttaattgcttgtaatcattcgaaataatttttagtttgcatccgtagttatcccctttatgtaactgtaaatttctcaacgcgatatctccattaataatgatgtcgaattcgtgctgtatacccatactgaatggatgaacgaataccgacggcgttaatagtaatttactttttcatctttacatattgggtactagttttactatcataagtttataaattccacaagctactatggaataagccaaccatcttagtataccacacatgtcttaaagtttattaattaattacatgttgttttatatatatcgctacgaatttaaagagaaattagtttaggaagaaaaattatctatctacatcatcacgtctctgtattctacgatagagtgctactttaagatgcgacagatccgtgtcatcaaatatatactccattaaaatgattattccggcagcgaacttgatattggatatatcacaacctttgttaatatctacgacaatagacagcagtcccatggttccataaacagtgagtttatctttctttgaagagatattttgtagagatcttataaaactgtcgaatgacatcgcatttatatctttagctaaatcgtatatgttaccatcgtaatatctaaccgcgtctatcttaaacgtttccatcgctttaaagacgtttccgatagatggtctcatttcatcagtcatactgagccaacaaatataatcgtgtataacatctttgatagaatcagactctaaagaaaacgaatcggctttattatacgcattcatgataaacttaatgaaaaatgtttttcgttgtttaagttggatgaatagtatgtcttaataattgttattatttcattaattaatatttagtaacgagtacactctataaaaacgagaatgacataactaatcataactagttatcaaagtgtctaggacgcgtaattttcatatggtatagatcctgtaagcattgtctgtattctggagctattttctctatcgcattagtgagttcagaatatgttataaatttaaatcgaataacgaacataactttagtaaagtcgtctatattaactcttttattttctagccatcgtaataccatgtttaagatagtatattctctagttactacgatctcatcgttgtctagaatatcacatactgaatctacatccaattttagaaattggtctgtgttacatatctcttctatattattgttgatgtattgtcgtagaaaactattacgtagaccattttctttataaaacgaatatatagtactccaattatctttaccgatatatttgcacacataatccattctctcaatcactacatctttaagattttcgttgttaagatatttggctaaactatataattctattagatcatcaacagaatcagtatatatttttctagatccaaagacgaactctttggcgtcctctataatattcccagaaaagatattttcgtgttttagtttatcgagatctgatctgttcatatacgccatgattgtacggtacgttatgataaccgcataaaataaaaatccattttcatttttaaccaatactattcataattgagattgatgtaatactttgttactttgaacgtaaagacagtacacggatccgtatctccaacaagcacgtagtaatcaaatttggtgttgttaaacttcgcaatattcatcaatttagatagaaacttatactcatcatctgttttaggaatccatgtattattaccactttccaacttatcattatcccaggctatgtttcgtccatcatcgttgcgcagagtgaataattcttttgtattcggtagttcaaatatatgatccatgcatagatcggcaaagctattgtagatgtgatttttcctaaatctaatataaaactcgtttactagcaaacactttcctgatttatcgaccaagacacatatggtttctaaatctatcaagtggtggggatccatagttatgacgcagtaacatatattattacattcttgactgtcgctaatatctaaatatttattgttatcgtattggattctgcatatagatggcttgtatgtcaaagatatagaacacataaccaatttatagtcgcgctttacattctcgaatctaaagttaagagatttagaaaacattatatcctcggatgatgttatcactgtttctggagtaggatatattaaagtctttacagatttcgtccgattcaaataaatcactaaataatatcccacattatcatctgttagagtagtatcattaaatctattatattttatgaaagatatatcactgctcacctctatatttcgtacatttttaaactgtttgtataatatctctctgatacaatcagatatatctattgtgtcggtagacgataccgttacatttgaattaatggtgttccattttacaacgtttaacaagttgaccaattcatttttaatagtatcaaactctccatgattaaatattttaatagtatccattttatatcactacggacacaaagtagctgacataaaccattgtataatttttatgttttatgtttattagcgtacacattttggaagttccggcttccatgtatttcctggagagcaagtagatgatgaggaaccagataggttatatccgtacttgcacttaaagtttacattgtcgttgtatgagtatgatcttttaaacccgctagacaagtatccgtttgatattgtaggatgtggacatttaacaatctgacacgtgggtggatcggaccattctcctcctgaacacaggacactagagttaccaatcaacgaatatccactattgcaactataagttacaacgctcccatcggtataaaaatcctcgtatccgttatgtcttccgttggatatagatggaggggattggcatttaacagattcacaaataggtgcctcgggattccataccatagatccagtagatcctaattcacaatacgatttagattcaccgatcaactgatatccgctattacaagagtacgttatactagagccaaagtctactccaccaatatcaagttggccattatcgatatctcgaggcgatgggcatctccgtttaatacattgattaaagagtgtccatccagtacctgtacatttagcatatataggtcccattttttgctttctgtatccaggtagacatagatattctatagtgtctcctatgttgtaattagcattagcatcagtctccacactattcttaaatttcatattaatgggtcgtgacggaatagtacagcatgatagaacgcatcctattcccaacaatgtcaggaacgtcacgctctccaccttcatatttatttatccgtaaaaatgttatcctggacatcgtacaaataataaaaagcccatatatgttcgctattgtagaaattgtttttcacagttgctcaaaaacgatggcagtgacttatgagttacgttacactttggagtctcatctttagtaaacatatcataatattcgatattacgagttgacatatcgaacaaattccaagtatttgattttggataatattcgtattttgcatctgctataattaagatataatcaccgcaagaacacacgaacatctttcctacatggttaaagtacatgtacaattctatccatttgtcttccttaactatatatttgtatagataattacgagtctcgtgagtaattccagtaattacatagatgtcgccgtcgtactctacagcataaactatactatgatgtctaggcatgggagacttttttatccaacgatttttagtgaaacattccacatcgtttaatactacatatttctcatacgtggtataaactccacccattacatatatatcatcgtttacgaataccgacgcgcctgaatatctaggagtaattaagtttggaagtcttatccatttcgaagtgccgtgtttcaaatattctgccacacccgttgaaatagaaaattctaatcctcctattacatataactttccatcgttaacacaagtactaacttctgattttaacgacgacatattagtaaccgttttccattttttcgttttaagatctacccgcgatacggaataaacatgtctattgttaatcatgccgccaataatgtatagacaattatgtaaaacatttgcattatagaattgtctatctgtattaccgactatcgtccaatattctgttctaggagagtaatgggttattgtggatatataatcagagtttttaatgactactatattatgttttataccatttcgtgtcactggctttgtagatttggatatagttaatcccaacaatgatatagcattgcgcatagtattagtcataaacttgggatgtaaaatgttgatgatatctacatcgtttggatttttatgtatccactttaataatatcatagctgtaacatcctcatgatttacgttaacgtcttcgtgggataagatagttgtcagttcatcctttgataattttccaaattctggatcggatgtcaccgcagtaatattgttgattatttctgacatcgacgcattatatagttttttaattccatatcttttagaaaagttaaacatccttatacaatttgtgaaattaatattatgaatcatagtttttacacatagatctactacaggcggaacatcaattattatggcagcaactagtatcatttctacattgtttatggtgatgtttatcttcttccagcgcatatagtctaatagcgattcaaacgcgtgatagtttataccattcaatataatcgcttcatcctttagatggtgatcctgaatgcgtttaaaaaaattatacggagacgccgtaataatttccttattcacttgtataatttccccattgatagaaaatattacgctttccattcttaaagtactataagtaattatagtataatgtaaacgtttatatattcaatatttttataaaaatcattttgacattaattcctttttaaatttccgtctatcatctatagaaacgtattctatgaatttataaaatgcttttacgtgtcctatcgtaggcgatagaaccgctaaaaagcctatcgaatttctacaaaagaatctgttatatggtatagggagagtataaaacattaaatgtccgtacttattaaagtattcagtagccaatcctaactctttcgaatacttattaatggctcttgttctgtacgaatctatttttttgaacaacggacctagtggtatatcttgttctatgtatctaaaataatgtctgactagatccgttagtttaatatccgcagtcatcttgtctagaatggcaaatctaactgcgggtttaggctttagtttagtttctatatctacatctatgtctttatctaacaccaaaaatataatagctaatattttattacaatcatccggatattcttctacgatctcactaactaatgtttctttggttatactagtatagtcactatcggacaaataaagaaaatcagatgatcgatgaataatacatttaaattcatcatctgtaagatttttgagatgtctcattagaatattattagggttagtactcattatcattcggcagctattacttattttattatttttcaccatatagatcaatcattagatcatcaaaatatgtttcaatcatcctaaagagtatggtaaatgactcttcccatctaatttctgaacgttcaccaatgtctctagccactttggcactaatagcgatcattcgcttagcgtcttctatattattaactggttgattcaatctatctagcaatggaccgtcggacagcgtcattctcatgttcttaatcaatgtacatacatcgccgtcatctaccaattcatccaacaacataagctttttaaaatcatcattataataggtttgatcgttgtcatttctccaaagaatatatctaataagtagagtcctcatgcttagttaacaactattttttatgttaaatcaattagtacaccgctatgtttaatacttattcatattttagtttttaggattgagaatcaatacaaaaattaatgcatcattaattttagaaatacttagtttccacgtagtcaatgaaacatttgaactcatcgtacaggacgttctcgtacaggacgtaactataaaccggtttatatttgttcaagatagatacaaatccgataactttttttacgaattctacgggatccactttaaaagtgtcataccgggttctttttatttttttaaacagatcaatggtgtgatgttgattaggtcttttacgaatttgatatagaatagcgtttacatatcctccataatggtcaatcgccatttgttcgtatgtcataaattctttaattatatgacactgtgtattatttagttcatccttgttcattgttaggaatctatccaaaatggcaattatactagaactataggtgcgttgtatacacatattgatgtgtctgtttatacaatcaatgctactaccttcgggtaaaattgtagcatcatataccatttctagtactttaggttcattattatccattgcagaggacgtcatgatcgaatcataaaaaaatatattatttttatgttattttgttaaaaataatcatcgaatacttcgtaagatactccttcatgaacataatcagttacaaaacgtttatatgaagtaaagtatctacgatttttacaaaagtccggatgcataagtacaaagtacgcgataaacggaataataatagatttatctagtctatctttttctatagctttcatagttagatacatggtctcagaagtaggattatgtaacatcagcttcgataaaatgactgggttatttagtcttacacattcgctcatacatgtatgaccgttaactacagagtctacactaaaatgattgaacaatagatagtctaccattgtttcgtattcagatagtacagcgtagtacatggcatcttcacaaattatatcattgtctaatagatatttgacgcatcttatggatcccacttcaacagccatcttaaaatcggtagaatcatattgctttcctttatcattaataatttctagaacatcatctctatcataaaagatacaaatattaactgtttgatccgtaataacattgctagtcgatagcaatttgttaataagatgcgctgggctcaatgtcttaataagaagtgtaagaggactatctccgaatttgttttgtttattaacatccgttgatggaagtaaaagatctataatgtctacattcttgactgttttagagcatacaatatggagaggtgtatttccatcatgatctggttttgagggactaattcctagtttcatcatccatgagattgtagaagcttttggattgtctgacataagatgtctatgaatatgatttttgccaaatttatccactatcctggcttcgaatccgatggacattatttttttaaacactctttctgaaggatctgtacacgccaacaacggaccacatccttcttcatcaaccgagttgttaatcttggctccatactgtaccaataaatttattctctctatgacttcatcatctgttcccgagagataatatagaggcgttttatgctgtttatcacacgcgtttggatctgcgccgtgcgtcagcagcatcgcgactattctattattattaattttagaagctatatgcaatggataatttccatcatcatccgtctcatttggagagtatcctctatgaagaagttcttcgacaaatcgttcatctagtcctttaattccacaatacgcatgtagaatgtgataattatttccagaaggttcgatagcttgtagcatattcctaaatacatctaaatttttactattatatttggcataaagagatagataatactcggccgacataatgttgtccattgtagtataaaaattaatatttctatttctgtatatttgcaacaatttactctctataacaaatatcataacttagttcttttatgtcaagaaggcactggtttagttcatctataaatgtcacgccataactaccacgcatgccatactcagaattatgataaagatatttatccttggggtgtaggtaatggggattaatctttgttggatcagtctctaagttaacacatgtcacacatgatccatttatagttatatcacacgatgatgatttatgaattgattccggaagatcgctatcgtattttgtggttccacaattcatttccatacatgttattgtcacactaatattatgatgaactttatctagccgctgagtggtaaacaacagaacagatagtttattatctttaccaacaccctcagccgctgccacaaatctctgatccgtatccatgatggtcatgtttatttctagtccgtatccagtcaacactatgttagcatttctgtcgatatagctttcactcatatgacactcaccaataatagtagaattaatgtcgtaatttacaccaatagtgagttcggcggcaaagtaccaataccggtaatcttgtcgaggaggacatatagtattcttgtattctaccgaatacccgagagatgcgatacaaaagagcaagactaatttgtaaaccatcttactcaaaatatgtaacaatagtacgatgcaatgagtaagacaataggaaatctatcttatatacacataattattctatcaattttaccaattagttagtgtaatgttaacaaaaatgtgggagaatctaattagtttttctttacacaattgacgtacatgagtctgagttccttgtttttgctaattatttcatccaatttattattcttgacgatatcgagatcttttgtataggagtcaaacttgtattcaacatgcttttctataatcattttagctatttcggcatcatccaatagtacattttccagattagcagaatagatattaatgtcgtatttgaacagagcctgtaacatctcaatgtctttattatctatagccaatttaatgtccggaatgaagagaagggaattattggtgtttgtcgacgtcatatagtcgagcaagagaatcatcatatccacgtgtccattttttatagtgatgtgaatacaactaaggagaatagccagatcaaaagtagatggtatctctgaaagaaagtaggaaacaatacttacatcattaagcatgacggcatgataaaatgaagttttccatccagttttcccatagaacatcagtctccaatttttcttaacaaacagttttaccgtttgcatgttaccactatcaaccgcataatacaatgcggtgtttcccttgtcatcaaattgtgaatcatccagtccactgaatagcaaaatctttactattttggtatcttccaatgtggctgcctgatgtaatggaaattcattctctagaagatttttcaatgctccagcgttcaacaacgtacatactagacgcacgttattatcagctattgcataatacaaggcactatgtccatggacatccgccttaaatgtatctttactagagagaaagcttttcagctgcttagacttccaagtattaattcgtgacagatccatgtctgaaacgagacgctaattagtgtatattttttcattttttataattttgtcatattgcaccagaattaataatatctctaatagatctgattagtagatacatggctatcgcaaaacaacatatacacatttaataaaaataatatttattaagaaaattcagatttcacgtacccatcaatataaataaaataatgattccttacaccgtacccatattaaggagattccaccttacccataaacaatataaatccagtaatatcatgtctgatgatgaacacaaatggtgtattaaattccagtttttcaggagatgatctcgccgtagctaccataatagtagatgcctctgctacagttccttgttcgtcgacatctatctttgcattctgaaacattttataaatatataatgggtccctagtcatatgtttaaacgacgcattatctggattaaacatactaggagccatcatttcggctatcgacttaatatccctcttattttcgatagaaaatttagggagtttaagattgtacactttattccctaattgagacgaccaatagtctaattttgcagccgtgatagaatctgtgaaatgggtcatattatcacctattgccaggtacatactaatattagcatccttatacggaaggcgtaccatgtcatattctttgtcatcgattgtgattgtatttccttgcaatttagtaactacgttcatcatgggaaccgttttcgtaccgtacttattagtaaaactagcattgcgtgttttagtgatatcaaacggatattgccatatacctttaaaatatatagtattaatgattgcccatagagtattattgtcgagcatattagaatctactacattagacataccggatctacgttctactatagaattaattttattaaccgcatctcgtctaaagtttaatctatataggccgaatctatgatattgttgataatacgacggtttaatacacacagtattatctacgaaactttgataagttagatcagtgtacgtatatttagatgttttcagcttagctaatcctgatattaattctgtaaatgctggacccagatctctttttctcaaatccatagtcttcaataattctattctagtattacctgatgcaggcaatagcgacataaacatagaaaacgaatagccaaacggcgagaagacaatattatcatcttgaatatttttatacgctactataccggcattggtaaatccttgtagacgataggcggacgctgaacacgctaacgatagtatcaataacgcaatcatgattttatggtattaataattaaccttatttttatgttcggtataaaaattattgatgtctacacatccttttgtaattgacatctatatatccttttgtataatcaactctaatcactttaacttttacagttttccctaccagtttatccctatattcaacatatctatccatatgcatcttaacactctctgccaagatagcttcagagtgaggatagtcaaaaagataaatatatagagcataatcattctcgtatactctgccctttattacatcacccgcattgggcaacgaataacaaaatgcaagcatcttgttaacgggctcgtaaattgggataaaaattatgtttttattgattttatatctattttattcaagagaatattcaggaatttctttttccggttgtatctcgtcgcagtatatatcatttgtacattgtttcatattttttaatagtttacaccttttagtaggactagtatcgtacaattcatagctgtattttgaattccaatcacgcataaaaatatcttccaattgttgacgaagacctaatccatcatccggtgtaatattaatagatgctccacatgtatccgtaaagtaatttcctgtccaatttgaggtacctatataggccgttttatcggttaccatatatttggcatggtttaccctagaatacggaatgggaggatcagcatctggtacaataaatagctttacttctatatttatgtttttagattttagcatagcgatagatcttaaaaagtttctcatgataaacgaagatcgttgccagcaactaatcaatagcttaacggatacttgtctgtctatagcggatcttcttaattcatcttctatataaggccaaaacaaaattttacccgccttcgaataaataatagggataaagttcataacagatacataaacgaatttactcgcatttctaatacatgacaataaagcggttaaatcattggttctttccatagtacatagttgttgcggtgcagaagcaataaatacagagtgtggaacgccgcttacgttaatactaagaggatgatctgtattataatacgacggataaaagtttttccaattatatggtagattgttaactccaagataccagtatacctcaaaaatttgagtgagatccgctgccaagttcctattattgaagatcgcaatacccaattccttgacctgagttagtgatctccaatccatgttagcgcttcctaaataaatatgtgtattatcagatatccaaaattttgtatgaagaactcctcctaggatatttgtaatatctatgtatcgtacttcaactccggccatttgtagtctttcaacatcctttaatggtttgttagatttattaacggctactctaactcgtactcctcttttgggtaattgtacaatctcgtttaatattatcgtgccgaaattcgtacccacttcatccgataaactccaataaaaagatgatatatctagtgtttttgtggtattggatagaatttccctccacatgttaaatgtagacaaatatactttatcaaattgcatacctataggaatagtttctgtaatcactgcgattgtattatccggattcattttatttgttaaaagaataatcctatatcacttcactctattaaaaatccaagtttctatttctttcatgactgattttttaacttcatccgtttccttatgaagatgatgtttggcaccttcataaatttttatttctctattacaatttgcatgttgcatgaaataatatgcacctaaaacatcgctaatcttattgtttgttccctggagtatgagagtcgggggggtgttaatcttggaaattatttttctaaccttgttggtagccttcaagacctgactagcaaatccagccttaattttttcatgattgactaatgggtcgtattggtatttataaactttatccatatctctagatactgattctggacatagctttccgactggcgcatttggtgtgatggttcccataagtttggcagctagcagattcagtcttgaaacagcatctgcattaactagaggagacattagaatcattgctgtaaacaagtttggattatcgtaagaggctagctcccatggaatgacccaataagtagatttaatagttaccacgtgctgtaccaaagtcatcaatcatcattttttcaccattacttcttccatgtccaatatgatcatgtgagaatactaaaattcctaacgatgatatgttttcagctagttcgtcataacgtccagaatgtttaccagctccatgacttatgaatactaatgccttaggatatgtaataggtttccaatatttacaatatatgtaatcattgtccagattgaacatacagtttgcactcatgattcacgttatataactatcaatattaacagttcgtttgatgatcatattatttttatgttttattgataattgtaaaaacatacaattaaatcaatatagaggaaggagacggctactgtcttttgtgagatagtcatggcgactaaattagattatgaggatgctgttttttactttgtggatgatgataaaatatgtagtcgcgactccatcatcgatctaatagatgaatatattacgtggagaaatcatgttatagtgtttaacaaagatattaccagttgtggaagactgtacaaggaattgatgaagttcgatgatgtcgctatacggtactatggtattgataaaattaatgagattgtcgaagctatgagcgaaggagaccactacatcaattttacaaaagtccatgatcaggaaagtttattcgctaccataggaatatgtgctaaaatcactgaacattggggatacaaaaagatttcagaatctagattccaatcattgggaaacattacagatttgatgaccgacgataatataaacatcttgatactttttctagaaaaaaaattgaattgatgatataggggtcttcataacgcataattattacgttagcattctatatccgtgttaaaaaaaattatcctatcatgtatttgagagttttatatgtagcaaacatgatagctgtgatgccaataagctttagatattcacgcgtgctagtgttagggatggtattatctggtggtgaaatgtccgttatataatctacaaaacaatcatcgcatatagtatgcgatagtagagtaaacatttttatagtttttactggattcatacatcgtctacccaattcggttataaatgaaattgtcgccaatcttacacccaaccccttgttatccattagcatagtattaacttcgttatttatgtcataaactgtaaatgattttgtagatgccatatcatacatgatattcatgtccctattataatcattactaactttatcacaatatatgttgataatatctatatatgatctagtctttgtgggcaactgtctatacaagtcgtctaaacgttgtttactcatatagtatcgaacagccatcattacatggtcccgttccgttgatagataatcgagtatgttagtggacttgtcaaatctatataccatattttctggaagtggatatacatagtcgtgatcaacattattgctagcctcatcttctatatcctgtactataccattatctatatcatctacataatctatgatattattacacataaacatcgacaacatactattgtttattatctaagtcctgttgatccaaacccttgatctcctctatttgtactatctagagattgtacttcttccagttctggataatatatacgttgatagattagctgagctattctatctccagtatttacattaaacgtacattttccattattaataagaatgactcctatgtttcccctataatcttcgtctattacaccacctcctatatcaatgccttttagtgacagaccagacctaggagctattctaccatagcagaacttaggcatggacatactaatatctgtcttaattaactgtctttctcctggagggatagtataatcgtaagcgctatacaaatcatatccggcagcacccggcgattgcctagtaggagatttagctctgttagtttccttaacaaatctaactggtgagttaatattcatgttgaacataaaactaatattttatttcaaaattatttaccatcccatatattccatgaataagtgtgatgattgtacacttctatagtatctatatacgatccacgataaaatcctcctatcaatagcagtttattatccactatgatcaattctggattatccctcggataaataggatcatctatcagagtccatgtattgctggattcacaataaaattccgcatttctaccaaccaagaataaccttctaccgaacactaacgcgcatgatttataatgaggataataagtggatggtccaaactgccactgatcatgattgggtagcaaatattctgtagttgtatcagtttcagaatgtcctcccattacgtatataacattgtttatggatgccactgctggattacatctaggtttcagaagactcggcatattaacccaagcagcatccccgtggaaccaacgctcaacagatgtgggatttggtagacctcctactacgtataatttattgttagcgggtatcccgctagcatacagtctggggctattcatcggaggaattggaatccaattgtttgatatataatttaccgctatagcattgttatgtatttcattgttcatccatccaccgatgagatatactacttctccaacatgagtacttgtacacatatggaatatatctataatttgatccatgttcataggatactctatgaatggatacttgtatgatttgcgtggttgtttatcacaatgaaatattttggtacagtctagtatccattttacattatttatacctctgggagaaagataatttgacctgattacatttttgataaggagtagcagatttcctaatttatttcttcgctttatataccacttaatgacaaaatcaactacataatcctcatctggaacatttagttcatcgctttctagaataagtttcatagatagataatcaaaattgtctatgatgtcatcttccagttccaaaaagtgtttggcaataaagtttttagtatgacataagagattggatagtccgtattctatacccatcatgtaacactcgacacaatattcctttctaaaatctcgtaagataaagtttatacaagtgtagatgataaattctacagaggttaatatagaagcacgtaataaattgacgacgttatgactatctatatatacctttccagtatacgagtaaataactatagaagttaaactgtgaatgtcaaggtctagacaaaccctcgtaactggatctttatttttcgtgtatttttgacgtaaatgtgtgcgaaagtaaggagataactttttcaatatcgtagaattgactattatattgcctcctatggcatcaataattgttttgaatttcttagtcatagacaatgctaatatattcttacagtacacagtattgacaaatatcggcatttatgtttctttaaaagtcaacatctagagaaaaatgattatctttttgagacataactcccattttttggtattcacccacacgtttttcgaaaaaattagtttttccttccaatgatatattttccatgaaatcaaacggattggtaacattataaatttttttaaatcccaattcagaaatcaatctatccgcgacgaattctatatatgttttcatcatttcacaattcattcctataagtttaactggaagagccgcagtaagaaattcttgttcaatggataccgcatctgttataatagatctaacggtttcttcactcggtggatgcaataaatgtttaaacatcaaacatgcgaaatcgcagtgcagaccctcgtctctactaattagttcgttggaaaacgtgagtccgggcattaggccacgctttttaagccaaaatatggaagcgaatgatccggaaaagaagattccttctactgcagcaaaggcaataagtctctctccataaccggcgctgtcatgtatccacttttgagcccaatcggccttcttttttacacaaggcatcgtttctatggcattaaagagatagtttttttcattactatctttaacataagtatcgatcaaaagactatacatttccgaatgaatgttttcaatggccatctgaaatccgtagaaacatctagcctcggtaatctgtacttctgtacaaaatcgttccgccaaattttcattcactattccgtcactggctgcaaaaaacgccaatacatgttttataaaatatttttcgtctggtgttagtttattccaatcattgatatctttagatatatctacttcttccactgtccaaaatgatgcctctgcctttttatacatgttccagatgtcatgatattggattgggaaaataacaaatctatttggatttggtgcaaggatgggttccataactaaattaacaataacaataaattttttttcagttatctatatgcctgtacttggattttttgtacatcgatatcgccgcaatcactacaataattacaagtattattgatagcattgttattagtactatcataattaaattatctacattcatgggtgctgaataatcgttattatcatcattatcattttgtaattgtgacatcatactagataaatcgtttgcgagattgttgtgggaagcgggcatggaggatgcattatcattattatttaacgccttccatttggattcacaaatgttacgcacattcaacattttatggaaactataattttgtgaaaacaaataacaagaaaactcgtcatcgttcaaatttttaacgatagtaaaccgattaaacgtcgagctaatttctaacgctagcgactctgttggatatgggtttccagatatatatcttttcagttcccctacgtatctataatcatctgtaggaaatggaagatatttccatttatctactgttcctaatatcatatgtggtggtgtagtagaaccattaagcgcgaaagatgttatttcgcatcgtattttaacttcgcaataatttctggttagataacgcactctaccagtcaagtcaatgatattagcctttacagatatattcatagtagtcgtaacgatgactccatcttttagatgcgatactcctttgtatgtaccagaatcttcgtacctcaaactcgatatatttaaacaagttaatgagatattaacgcgttttatgaatgatgatatataaccagaagttttatcctcggtggctagcgctataaccttatcattataataccaactagtgtgattaatatgtgacacgtcagtgtgggtacaaatatgtacattatcgtctacgtcgtattcgatacatccgcatacagccaacaaatataaaatgacaaatactctaacgacgttcgtacccatcttgatgcggtttaataaatgttttgatttcaatttattgtaaaaaaagattcggttttatactgttcgatattctcattgcttatattttcatctatcatctccacacagtcaaatccgtggttagcatacacctcatcaaccggtaaaagactatcggactcttctatcattataactctagaatatttaatttggtcattattaatcaagtcaattatcttatttttaacaaacgtgagtattttactcattttttataaaaacttttagaaatatacagactctatcgtgtgtctatatcttctttttatatccaatgtatttatgtctgatttttcttcatttatcatatataatggtccaaattctacacgtgcttcggattcatccagatcattaaggttcttataattgtaacatccttctcttccctcttctacatcttccttcttattcttattcttagcgtcacagaatctaccacagcaggatcccatgacgagcgtcatattaaactaatccattttcaattataatatatgattagtaatgaccattaaaataaaaaatattcttcataaccggcaagaaagtgaaaagttcacattgaaactatgtcagtagtatacatcatgaaatgatgatatatatatactctattttggtggaggattatatgatataattcgtggataatcatttttaagacacatttctttattcgtaaatcttttcacgttaaatgagtgtccatattttgcaatttcttcatatgatggcggtgtacgtggacgaggctgctcctgttcttgttgtggtcgccgactgtcgtgtctgcgtttagatccctccattatcgcgattgcgtagatggagtactattttataccttgtaattaaatttttttattaattaaacgtataaaaacgttccgtatctgtatttaagagccagatttcgtctaatagaacaaatagctacagtaaaaataactagaataattgctacacccactagaaaccacggatcgtaatacggcaatcggttttcgataataggtggaacgtatattttatttaaggacttaacaattgtctgtaaaccacaatttgcttccgcggatcctgtattaactatctgtaaaagcatatgttgaccgggcggagccgaacattctccgatatctaatttctgtatatctataatattattaacctccgcatacgcattacagttcttttctagcttggataccgcactaggtacatcgtctagatctattcctatttcctcagcgatagctcttctatccttttccggaagcaatgaaatcacttcaataaatgattcaaccatgagtgtgaaactaagtcgagaattactcatgcatttgttagttattcggagcgcgcaatttttaaactgtcctataacctctcctatatgaatagcacaagtgacattagtagggatagaatgttgagctaatttttgtaaataactatctataaaaagattatacaaagttttaaactctttagtttccgccatttatccagtctgagaaaatgtctctcataataaatttttccaagaaactaattgggtgaagaatggaaacctttaatctatatttatcacagtctgttttggtacacatgatgaattcttccaatgccgtactaaattcgatatctttttcgatttctggatatgtttttaataaagtatgaacaaagaaatggaaatcgtaataccagttatgtttaactttgaaattgttttttattttcttgttaatgattccagccacttgggaaaagtcaaagtcgtttaatgccgatttaatacgttcattaaaaacaaactttttatcctttagatgaattattattggttcattggaatcaaaaagtaagatattatcgggtttaagatctgcgtgtaaaaagttgtcgcaacagggtagttcgtagattttaatgtataacagagccatctgtaaaaagataaactttatgtattgtaccaaagatttaaatcctaatttgatagctaactcggtatctactttatctgccgaatacagtgctaggggaaaaattataatgtttcctctttcatattcgtagttagttctcttttcatgttcgaaaaagtgaaacatgcggttaaaatagtttataacattaatattactgttaataactgccggataaaagtgggatagtaatttcacgaatttgatactgtcctttctctcgttaaacgcctttaaaaaaactttagaagaatatctcaatgagagttcctgaccatccatagtttgtatcaataatagcaacatatgaagaacacgtttatacagagtatgtaaaaatgttaatttatagtttaatcccatggcccacgcacacacgattaattttttttcatctccctttagattgttgtatagaaatttgggtactgtgaactccgccgtagtttccatgggactatataattttgtggcctcgaatacaaattttactacatagttatctatcttaaagactataccatatcctcctgtagatatgtgataaaaatcgtcgtttataggataaaatcgtttatccttttgttggaaaaaggatgaattaatgtaatcattctcttctatctttagtagtgtttccttattaaaattcttaaaataatttaacaatctaactgacggagcccaattttggtgtaaatctaattgggacattatattgttaaaatacaaacagtctcctaatataacagtatctgataatctatggggagacatccattgatattcaggggatgaatcattggcaacacccatttattgtacaaaaagccccaatttacaaacgaaagtccaggtttgatagagacaaacaattaactattttgtctctgtttttaacacctccacagtttttaatttctttagtaatgaaattattcacaatatcagtatcttctttatctaccagagattttactaacttgataaccttggctgtctcattcaatagggtagtaatatttgtatgtgtgatattgatatctttttgaattgtttcttttagaagtgattctttgatggtgccagcatacgaattacaataatgcagaaactcggttaacatgcaggaattatagtaagccaattccaattgttgcctgtgttgtattagagtgtcaatatgagcaatggtgtccttgcgtttctctgatagaatgcgagcagcgattttggcgttatcatttgacgatatttctggaatgacgaatcctgtttctactaactttttggtaggacaaagtgaaacaatcaagaagatagcttctcctcctatttgtggaagaaattgaactcctctagatgatctactgacgatagtatctccttgacagatattggaccgaattacagaagtacctggaatgtaaagccctgaaaccccctcattttttaagcagattgttgccgtaaatcctgcactatgcccaagatagagagctcctttggtgaatccatctctatgtttcagtttaaccaagaaacagtcagctggtctaaaatttccatctctatctaatacagcatctaacttgatgtcaggaactatgaccggtttaatgttatatgtaacattgagtaaatccttaagttcataatcatcactgtcatcagttatgtacgatccaaacaatgtttctaccggcatagtggatacgaagatgctatccatcagaatgtttccctgattagtattttctatatagctattcttctttaaacgattttccaaatcagtaactatgttcatttttttaggagtaggacgcctagccagtatggaagaggattttctagatcctctcttcaacatctttgatctcgatggaatgcaaaaccccatagtgaaacaaccaacgataaaaataatattgtttttcactttttataattttaccatctgactcatggattcattaatatctttataagagctactaacgtataattctttataactgaactgagatatatacaccggatctatggtttccataattgagtaaatgaatgctcggcaataactaatggcaaatgtatagaacaacgaaattatactagagttgttaaagttaatattttctatgagctgttccaataaattatttgttgtgactgcgttcaagtcataaatcatcttgatactatccagtaaaccgtttttaagttctggaatattatcatcccattgtaaagcccctaattcgactatcgaatatcctgctctgatagcagtttcaatatcgacggacgtcaatactgtaataaaggtggtagtattgtcatcatcgtgataaactacgggaatatggtcgttagtaggtacggtaactttacacaacgcgatatataactttccttttgtaccatttttaacgtagttgggacgtcctgcagggtattgttttgaagaaatgatatcgagaacagatttgatacgatatttgttggattcctgattattcactataatataatctagacagatagatgattcgataaatagagaaggtatatcgttggtaggataatacatccccattccagtattctcggatactctattgatgacactagttaagaacatgtcttctattctagaaaacgaaaacatcctacatggactcattaaaacttctaacgctcctgattgtgtctcgaatgcctcgtacaaggatttcaaggatgccatagattctttgaccaacgatttagaattgcgtttagcatctgatttttttattaaatcgaatggtcggctctctggtttgctaccccaatgataacaatagtcttgtaaagataaaccgcaagaaaatttatacgcatccatccaaataaccctagcaccatcggatgatattaatgtattattatagattttccatccacaattattgggccagtatactgttagcaacggtatatcgaatagattactcatgtaacctactagaatgatagttcgtgtactagtcataatatctttaatccaatctaaaaaatttaaaattagattttttacactgttaaagttaacaaaagtattacccgggtacgtggatatcatatatggcattggtccattatcagtaatagctccataaactgatacggcgatggtttttatatgtgtttgatctaacgaggaagaaattcgcgcccacaattcatctctagatatgtatttaatatcaaacggtaacacatcaatttcgggacgcgtatatgtttctaaatttttaatccaaatataatgatgacctatatgccctattatcatactgtcaactatagtacacctagggaacttacgatacatctgtttcctataatcgttaaattttacaaatctataacatgctaaaccttttgacgacagccattcattaatttctgatatggaatctgtattctcgataccgtatcgttctaaagccagtgctatatctccctgttcgtgggaacgctttcgtataatatcgatcaacggataatctgaagtttttggagaataatatgactcatgatctatttcgtccataaacaatctagacataggaattggaggcgatgatcttaattttgtgcaatgagtcgtcaatcctataacttctaatcttgtaatattcatcatcgacataatactatctatgttatcatcgtatattagtataccatgaccttcttcatttcgtgccaaaatgatatacagtcttaaatagttacgcaatatctcaatagtttcataattgttagctgttttcatcaaggtttgtatcctgtttaacatgatggcgttctataacgtctctattttctatttttaattttttaaatttttaacgatttactgtggctagatacccaatctctctcaaatatttttttagcctcgcttacaagctgtttatctatactattaaaactgacgaatccgtgattttggtaatgggttccgtcgaaatttgccgaagtgatatgaacatattcgtcgtcgactatcaacaattttgtattattctgaatagtgaaaaccttcacagatagatcattttgaacacacaacgcatctagacttttggcggttgccatagaatatacgtcgttcttatcccaattaccaactagaagtctgatcttaactcctctattaatggctgcttctataatggagttgtaaatgtcgggccaatagtagctattaccgtcgacacgtgtagtgggaactatggccaaatgttcaatatctatactagtcttagctgacctgagtttatcaataactacatcggtatctagatctctagaatatcccaataggtgttccggagaatcagtaaagaacactccacctataggattcttaatatgatacgcagtgctaactggcaaacaacaagccgcagagcataaattcaaccatgaattttttgcgctattaaaggctttaaaagtatcaaatcttctacgaagatctgtggccagcgggggataatcagaatatacacctaacgttttaatcgtatgtatagatcctccagtaaatgacgcgtttcctacataacatctttcatcatctgacacccaaaaacaaccgagtagtagtcccacattattttttttatctatattaacggttataaaatttatatccgggcagtgactttgtagctctcccagatttcttttccctcgttcatctagcaaaactattattttaatccctttttcagatgcctcttttagtttatcaaaaataagcgctcccctagtcgtactcagaggattacaacaaaaagatgctatgtatatatatttcttagctagagtgataatttcgttaaaacattcaaatgttgttaaatgatcggatctaaaatccatattttctggtagtgtttctaccagcctacattttgctcccgcaggtaccgatgcaaatggccacatttagttaacataaaaacttatacatcctgttctatcaacgattctagaatatcatcggctatatcgctaaaattttcatcaaagtcgacatcacaacctaactcagtcaatatattaagaagttccatgatgtcatcttcgtctatttctatatccgtatccattgtagattgttgaccgattatcgagtttaaatcattactaatactcaatccttcagaatacaatctgtgtttcattgtaaatttataggcggtgtatttaagttggtagattttcaattatgtattaatatagcaacagtagttcttgctcctccttgattctagcatcctcttcattattttcttctacgtacataaacatgtccaatacgttagacaacacaccgacgatggcggccgctacagacacgaatatgactaaaccgatgaccatttaaaaacccctctctagctttcacttaaactgtatcgatcattcttttagcacatgtataatataaaaacattattctatttcgaatttaggcttccaaaaatttttcatccgtaaaccgataataatatatatagacttgttaatagtcggaataaatagattaatgcttaaactatcatcatctccacgattagagatacaatatttacattctttttgctgtttcgaaactttatcaatacacgttaatacaaacccaggaaggagatattgaaactgaggctgttgaaaatgaaacggtgaatacaataattcagataatgtaaaatcatgattccgtattctgatgatattagaactgctaatggatgtcgatggtatgtatctaggagtatctattttaacaaagcatcgatttgctaatatacaattatccttttgattaattgttattttattcatattcttaaaaggtttcatatttatcaattcttctacattaaaaatttccatttttaatttatgtagccccgcaatactcctcattacgtttcattttttgtctataatatccattttgttcatctcggtacatagattatccaattgagaagcgcatttagtagttttgtacattttaagtttattgacgaatcgtcgaaaactagttatagttaacattttattatttgataccctgatattaatacccctgccgttactattatttataactgatgtaatccacgtaacattggaattaactatcgatagtaatgcatcgacgcttccaaaattgtctattataaactcaccgataatttttttattgcatgttttcatattcattaggattatcaaatctttaatcttattacgattgtatgcgttgatattacaagacgtcattctaaaagacggaggatctccatcaaatgccagacaatcacgtacaaagtacatggaaataggttttgttctattgcgcatcatagatttatatagaacacccgtagaaatactaatttgttttactctataaaatactaatgcatctatttcatcgttttgtataacgtctttccaagtgtcaaattccaaatttttttcattgatagtaccaaattcttctatctctttaactacttgcatagataggtaattacagtgatgcctacatgccgttttttgaaactgaatagatgcgtctagaagcgatgctacgctagtcacaatcaccactttcatatttagaatatatatatgtaaaaatatagtagaatttcattttgtttttttctatgctataaatgaattctcattttgcatctgctcatactccgttttatattaataccaaagaaggaagatatctggttctaaaagccgttaaagtatgcgatgttagaactgtagaatgcgaaggaagtaaagcttcctgcgtactcaaagtagataaaccctcatcgcccgcgtgtgagagaagaccttcgtccccgtccagatgcgagagaatgaataaccctggaaaacaagttccgtttatgaggacggacatgctacaaaatatgttcgcggctaatcgcgataatgtagcttctagacttttgtcctaaaatactattatatccttttcgatattaataaatccgtgtcgtccaggttttttatctctttcagtatgtgaatagataggtattttatctctattcatcatcgaatttaagagatccgataaacattgtttgtattctccagatgtcagcatctgatacaacaatatatgtgcacataaacctctggcacttatttcatgtaccttccccttatcactaaggagaatagtatttgagaaatatgtatacatgatattatcatgaattagatatacagaatttgtaacactctcgaaatcacacgatgtgtcggcgttaagatctaatatatcactcgataacacattttcatctagatacactagacattttttaaagctaaaatagtctttagtagtaacagtaactatgcgattattttcatcgatgatacatttcatcggcatattattacgcttaccatcaaagactataccatgtgtatatctaacgtattctagcatggttgccatacgcgcattaaacttttcaggatctttggatagatcttccaatctatctatttgagaaaacatttttatcatgttcaatagttgaaacgtcggatccactatatagatattatctataaagattttaggaactacgttcatggtatcctggcgaatattaaaactatcaatgatatgattatcgttttcatcttttatcaccatatagtttctaagatatgggattttacttaatataatattatttcccgtgataaattttattagaaaggccaaatctataagaaaagtcctagaattagtctgaagaatatctatatcgccgtatagtatatttggattaattagatatagagaatatgatccgtaacatatacaacttttattatggcgtctaagatattcttccatcaacttattaacatttttgactagggaagatacattatgacgtcccattacttttgccttgtctattactgcgacgttcatagaatttagcatatctcttgccaattcttccattgatgttacattataagaaattttagatgaaattacatttggagctttaatagtaagaactcctaatatgtccgtgtatgtggtcactaatacagattgtagttctataatcgtaaataatttacctatattatatgtttgagtctgtttagaaaagtagctaagtatacgatcttttatttctgatgcagatgtattaacatcggaaaaaaatctttttttattcttttttactaaagatacaaatatgtctttgttaaaaacagttattttctgaatatttctagcttgtaattttaacatatgatattcgttcacactaggtactctgcctaaataggtttctataatctttaatgtaatattaggaaaagtattctgatcaggattcctattcattttgaggatttaaaactctgattattgtctaatatggtctctacgcaaactttttcacagagcgatagagtttttgataactcgtttttcttaagaaatataaaactactgtctccagagctcgctctatcttttattttatctaattcgatacaaactcctgatactggttcagaaagtaattcattaattttcagtcctttatagaagatatttaatatagataatacaaaatcttcagtttttgatatcgatctgattgatcctagaactagatatattaataacgtgctcattaggcagtttatggcagcttgataattagatatagtatattccagttcatatttattagataccgcattgcccagattttgatattctatgaattcctctgaaaataaatccaaaataactagacattctattttttgtggattagtgtactctcttccctctatcatgttcactactggtgtccacgatgataaatatctagagggaatataatatagtccataggatgccaatctagcaatgtcgaataactgtaattttattcttcgctcttcattatgaattgattcttgaggtataaacctaacacaaattatattattagacttttcgtatgtaatgtctttcatgttataagtttttaatcctggaatagaatctattttaatgaggcttttaaacgcagagttctccaacgagtcaaagcataatactctgttgtttttcttatatacgatgttacgattttcttctttgaatggaataggtttttgaattagtttataattacaacataatagataaggaagtgtgcaaatagtacgcggaaaaaacataatagctcccctgttttcatccatggttttaagtaaatgatcactggcttctttagtcaatggatattcgaacattaaccgtttcatcatcattggacagaatccatatttcttaatgtaaagagtgatcaaatcattgtgtttattgtaccatcttgttgtaaatgtgtattcggttatcggatctgctcctttttctattaaagtatcgatgtcaatctcgtctaagaattcaactatatcgacatatttcatttgtatacacataaccattactaacgtagaatgtataggaagagatgtaacgggaacagggtttgttgattcgcaaactattctaatacataattcttctgttaatacgtcttgcacgtaatctattatagatgccaagatatctatataattattttgtaagatgatgttaactatgtgatctatataagtagtgtaataattcatgtattttgatatatgttccaactctgtctttgtgatgtctagtttcgtaatatctatagcatcctcaaaaaatatattcgcatatattcccaagtcttcagttctatcttctaaaaaatcttcaacgtatggaatataataatctattttacctcttctgatatcattaatgatatagtttttgacactatcttctgtcaattgattcttattcactatatctaagaaacggatagcgtccctaggacgaactactgccattaatatctctattatagcttctggacataattcatctattataccagaattaatgggaactattccgtatctatctaacatagttttaagaaagtcagaatctaagacctgatgttcatatattggttcatacatgaaatgatctctattgatgatagtgactatttcattctctgaaaattggtaactcattctatatatgctttccttgttgatgaaggatagaatatactcaatagaatttgtaccaacaaactgttctcttatgaatcgtatatcatcatctgaaataatcatgtaaggcatacatttaacaattagagacttgtctcctgttatcaatatactattcttgtgataatttatgtgtgaggcaaatttgtccacgttctttaattttgttatagtagatatcaaatccaatggagctacagttcttggcttaaacagatatagtttttctggaacaaattctacaacattattataaaggactttgggtaaataagtgggatgaaatcctattttaattaatgcgatagccttgtcctcgtgcagatatccaaacgcttttgtgatagtatggcattcattgtctagaaacgctctacgaatatctgtgacagatatcatctttagagaatatactagtcgcgttaatagtactacaatttgtattttttaatctatctcaataaaaaaattaatatgtatgattcaatgtataactaaactactaactgttattgataactagaatcagaatctaatgatgacgtacccaagaagtttatctactgccaatttagctgcattatttttagcatctcgtttagattttccatctgccttatcgaatactcttccgtcgatatctacacaggcataaaatgtaggagagttactaggcccaactgattcaatacgaaaagaccaatctctcttagttatttggcagtactcattaataacggtgacagggttagcatctttccaatcaataatttttttagccggaataacatcatcaaaagacttatgatcctctctcattgatttttcgcgggatacatcatctattatgacgtcagccataacatcagcatccggcttatccgcctccgttgtcataaaccaacgaggaggaatatcgtcggagctgtacaccatagcactacgttgaagatcgtacagagctttattaacttctcgcttctccatattaagttgtctagttagttgtgcagcagtagctccttcgattccaatggttttaatagcctcacacacaatctctgcgttagaacgttcgtcgatatagattttagacatttttagagagaactaacacaaccagcaataaaactgaacctactttatcatttttttattcatcatcctctggtggttcgtcgttcctatcaaatgtagctctgattaacccgtcatctataggtgatgctggttctggagattctggaggagatggattattatctggaagaatctctgttatttccttgttttcatgtatcgattgcgttgtaacattaagattgcgaaatgctctaaatttgggaggcttaaagtgttgtttgcaatctctacacgcgtgtctaactagtggaggttcgtcagctgctctagtttgaatcatcatcggcgtagtattcctacttttacagttaggacacggtgtattgtatttctcgtcgagaacgttaaaataatcgttgtaactcacatcctttattttatctatattgtattctactcctttcttaatgcattttataccgaataagagatagcgaaggaattctttttcggtgccgctagtacccttaatcatatcacatagtgttttatattccaaatttgtggcaatagacggtttatttctatacgatagtttgtttctggaatcctttgagtattctataccaatattattctttgattcgaatttagtttcttcgatattagattttgtattacctatattcttgatgtagtactttgatgatttttccatggcccattctattaagtcttccaagttggcatcatccacatattgtgatagtaattctcggatatcagtagcggctaccgccattgatgtttgttcattggatgagtaactactaatgtatacattttccatttataacacttatgtattaactttgttcatttatattttttcattattatgttgatattaacaaaagtgaatatatatatatgttaataattgtattgtggttatacggctacaattttataatgagtgaaagtcagtgtccgatgatcaatgacgatagctttactctgaaaagaaagtatcaaatcgatagtgcggagtcaacaataaaaatggataagaagaggataaagtttcagaatagagccaaaatggtaaaagaaataaatcagacaataagagcagcacaaactcattacgagacattgaaactaggatacataaaatttaagagaatgattaggactactactctagaagatatagcaccatctattccaaataatcagaaaacttataaactattctcggacatttcagccatcggcaaagcatcacagaatccgagtaagatggtatatgctctgctgctttacatgtttcccaatttgtttggagatgatcatagattcattcgttatagaatgcatccaatgagtaaaatcaaacacaagatcttctctcctttcaaacttaatcttattagaatattagtggaagaaagattctataataatgaatgcagatctaataaatggaaaataattggaacacaagttgataaaatgttgatagctgaatctgataaatatacaatagatgcaaggtataacctaaaacccatgtatagaatcaagggagaatctgaagaagataccctcttcatcaaacagatggtagaacaatgtgtgacatcccaggaattggtggaaaaagtgttgaagatactgtttagagatttgttcaagagtggagaatacaaagcgtacagatacgatgatgatgtagaaaatggattcattggattggatacactaaaattaaacattgttcatgatatagttgaaccatgtatgcctgttcgtaggccagtggctaagatactgtgtaaagaaatggtaaataaatactttgagaatccgctacatattattggtaaaaatcttcaagagtgcattgactttgttagtgaataggcatttcatctttctccaatactaattcaaattgttaaattaataatggatagtataaatagttattagttataagatagtaaaaataattattagaataagagtgtagtatcatagataactctcttctataaaaatggattttattcgtagaaagtatcttatatacacagtagaaaataatatagattttttaaaggatgatacattaagtaaagtaaacaattttaccctcaatcatgtactagctctcaagtatctagttagcaattttcctcaacatgttattactaaggatgtattagctaataccaatttttttgttttcatacatatggtacgatgttgtaaagtgtacgaagcggttttacgacacgcatttgatgcacccacgttgtacgttaaagcattgactaagaattatttatcgtttagtaacgcaatacaatcgtacaaggaaaccgtgcataaactaacacaagatgaaaaatttttagaggttgccgaatacatggacgaattaggagaacttataggcgtaaattatgacttagttcttaatccattatttcacggaggggaacccatcaaagatatggaaatcatttttttaaaactgtttaagaaaacagacttcaaagttgttaaaaaattaagtgttataagattacttatttgggcatacctaagcaagaaagatacaggcatagagtttgcggataatgatagacaagatatatatactctatttcaacaaactggtagaatcgtccatagcaatctaacagaaacgtttagagattatatctttcccggagataagactagctattgggtgtggttaaacgaaagtatagctaatgatgcggatatcgttcttaatagacccgccattaccatgtatgataaaattcttagttatatatactctgagataaaacaaggacgcgttaataaaaacatgcttaagttagtttatatctttgagcctgaaaaagatatcagagaacttctgctagaaatcatatatgatattcctggagatatcctatctattattgatgcaaaaaacgacgattggaaaaaatattttattagtttttataaagctaattttattaacggtaatacatttattagtgatagaacgtttaacgaggacttattcagagttgttgttcaaatagatcccgaatatttcgataatgaacgaattatgtctttattctctacgagtgctgcggacattaaacgatttgatgagttagatattaataacagttatatatctaatataatttatgaggtgaacgatatcacattagatacaatggatgatatgaagaagtgtcaaatctttaacgaggatacgtcgtattatgttaaggaatacaatacatacctgtttttgcacgagtcggatcccatggtcatagagaacggaatactaaagaaactgtcatctataaaatccaagagtagacggctgaacttgtttagcaaaaacattttaaaatattatttagacggacaattggctcgtctaggtcttgtgttagatgattataaaggagacttgttagttaaaatgataaaccatcttaagtctgtggaggatgtatccgcattcgttcgattttctacagataaaaaccctagtattcttccatcgctaatcaaaactattttagctagttataatatttccatcatcgtcttatttcaaaggtttttgagagataatctatatcatgtagaagaattcttggataaaagcatccatctaaccaagacggataagaaatatatacttcaattgataagacacggtagatcatagaacagaccaaatatattattaataatttgtatatacatagatataattatcacacatttttgataaatgggaactgctgcaacaattcagactcccaccaaattaatgaataaagaaaatgcagaaatgattttggaaaaaattgttgatcatatagttatgtatattagtgacgaatcaagtgattcagaaaataatcctgaatatattgattttcgtaacagatacgaagactatagatctctcattataaaaagtgatcacgagtttgtaaagctatgtaaaaatcatgcggagaaaagttctccagaaacgcaacaaatgattatcaaacacatatacgaacaatatcttattccagtatctgaagtactattaaaacctataatgtccatgggtgacataattacatataacggatgtaaagacaatgaatggatgctagaacaactctctaccctaaactttaacaatctccgcacatggaactcatgtagcataggcaatgtaacgcgtctgttttatacattttttagttatctgatgaaagataaactaaatatataagtataatcccattctaatactttaacctgatgtattagcatcttattagaatattaacctaactaaaagacataacataaaaactcattacatagttgataaaaagcggtaggatataaatattatggctgccaccgttccgcgttttgacgacgtgtacaaaaatgcacaaagaagaattctagatcaagaaacattttttagtagaggtctaagtagaccgttaatgaaaaacacatatctatttgataattacgcgtatggatggataccagaaactgcaatttggagtagtagatacgcaaacttagatgcaagtgactattatcccatttcgttgggattacttaaaaagttcgagtttctcatgtctctatataaaggtcctattccagtatacgaagaaaaagtaaatactgaattcattgctaatggatctttctccggtagatacgtatcatatcttagaaagttttctgctcttccaacaaacgagtttattagttttttgttactgacttccattccaatctataatatcttgttctggtttaaaaatactcagtttgatattactaaacacacattattcagatacgtctatacagataatgccaaacacctggcgttggctaggtatatgtatcaaacaggagactataagcctttgtttagtcgtctcaaagagaattatatatttaccggtcccgttccaatatgtatcaaagatatagatcaccctaatcttagtagagcaagaagtccatccgattatgagacattagctaatattagtactatattgtactttaccaagtatgatccggtattaatgtttttattgttttacgtacctgggtattcaattactacaaaaattactccagccgtagaatatctaatggataaactgaatctaacaaagagcgacgtacaactgttgtaaattattttatgcttcgtaaaatgtaggttttgaaccaaacattctttcaaagaatgagatgcataaaactttattatccaatagattgactatttcggacgtcaatcgtttaaagtaaacttcgtaaaatattctttgatcactgccgagtttaaaacttctatcgataattgtttcatatgttttaatatttacaagttttttggtccatggtccattaggacaaatatatgcaaaataatatcgttctccaagttctatagtctctggattatttttattatattcagtaaccaaatacatattagggttatctgcggatttataatttgagtgatgcattcgactcaacataaataattctagaggagacgatctactatcaaattcggatcgtaaatctgtttctaaagaacggagaatatctatacatacctgattagaattcatccgtccttcagacaacatctcagacagtctggttttgtacatcttaatcatattcttatgaaacttggaaacatctcttctagtttcactagtacctttattaattctctcaggtacagattttgaattcgacgatgctgagtatttcatcgttgtatatttcttcttcgattgcataatcagattcttatataccgcctcaaactctattttaaaattattaaacaatactctattattaatcagtcgttctaactctttcgctatttctatagacttatctacatcttgactgtctatctctgtaaacacggagtcggtatctccatacacgctacgaaaacgaaatctgtaatctataggcaacgatgttttcacaatcggattaatatctctatcgtccatataaaatggattacttaatggattggcaaaccgtaacataccgttagataactctgctccatttagtaccgattctagatacaagatcattctacgtcctatggatgtgcaactcttagccgaagcgtatgagtatagagcactatttctaaatcccatcagaccatatactgagttggctactatcttgtacgtatattgcatggaatcatagatggccttttcagttgaactggtagcctgttttagcatctttttatatctggctctctctgccaaaaatgttcttaatagtctaggaatggttccttctatcgatctatcgaaaattgctatttcagagatgaggttcggtagtctaggttcacaatgaaccgtaatatatctaggaggtggatatttctgaagcaatagctgattatttatttcttcttccaatctattggtactaacaacgacaccgactaatgtttccggagatagatttccaaagatacacacattaggatacagactgttataatcaaagattaatacattattactaaacattttttgttttggagcaaataccttaccgccttcataaggaaacttttgttttgtttctgatctaactaagatagttttagtttccaacaatagctttaacagtggacccttgatgactgtactcgctctatattcgaataccatggattgaggaagcacatatgttgacgcacccgcgtctgtttttgtttctactccataatactcccacaaatactgacacaaacaagcatcatgaatacagtatctagccatatctaaagctatgtttagattataatccttatacatctgagctaaatcaacgtcatcctttccgaaagataatttatatgtatcattaggtaaagtaggacataatagtacgactttaaatccattttcccaaatatctttacgaattactttacatataatatcctcatcaacagtcacataattacctgtggttaaaacctttgcaaatgcagcggctttgcctttcgcgtccgtagtatcgtcaccgatgaacgtcatttctctaactcctttatttaatactttacccatgcaactgaacgcgttcttggatatagaatccaatttgtacgaatccaatttttcaaatttttgaatgaatgaatatagatcgaaaaatatagttccattattgttattaacgtgaaacgtagtattggccatgccgcctactcccttatgactagactgatttctctcataaatacagagatgtacagcttcctttttgtccggagatctaaagataatcttctctcctgttaataactctagacgattagtaatatatctcagatcaaagttatgtccgttaaaggtaacgacatagtcgaacgttagttccaacaattgtttagctattcgtaacaaaactatttcagaacataaaactagttctcgttcgtaatccatttccattagtgactgtatcctcaaacatcctctatcgacggcttcttgtatttcctgttccgttaacatctcttcattaatgagcgtaaacaataatcgtttaccacttaaatcgatataacagtaacttgtatgcgagattgggttaataaatacagaaggaaacttcttatcgaagtgacactctatatctagaaataagtacgatcttgggatatcgaatctaggtatttttttagcgaaacagttacgtggatcgtcacaatgataacatccattgttaatctttgtcaaatattgctcgtccaacgagtaacatccgtctggagatatcccgttagaaatataaaaccaactaatattgagaaattcatccatggtggcattttgtatgctgcgtttctttggctcttctatcaaccacatatctgcgacggagcattttctatctttaatatctagattataacttattgtctcgtcaatgtctatagttctcatctttcccaacggcctcgcattaaatggaggaggagacaatgactgatatatttcgtccgtcactacgtaataaaagtaatgaggaaatcgtataaatacggtctcaccatttcgacatctggatttcagatataaaaatctgttttcaccgtgactttcaaaccaattaatgcaccgaacatccatttatagaatttagaaatatattttcatttaaatgaatcccaaacattggggaagagccgtatggaccattatttttatagtactttcgcaagcgggtttagacggcaacatagaagcgtgtaaacgaaaactatatactatagttagcactcttccatgtcctgcatgtagacggcacgcgactatcgctatagaggacaataatgtcatgtctagcgatgatctgaattatatttattattttttcatcagattatttaacaatttggcatctgatcccaaatacgcgatcgatgtgacaaaggttaaccctttataaacttaacccattataaaacttatgattagtcacaactgaaataaccgcgtgattattttttggtataattctacacggcatggtttctgtgactatgaattcaacccccgttacattagtgaaatctttaacaaacagcaagggttcgtcaaagacataaaactcattgtttacaatcgaaatagaccccctatcacacttaaaataaaaaatatccttatcctttaccaccaaataaaattctgattggtcaatgtgaatgtattcacttaacagttccacaaatttatttattaactccgaggcacatacatcgtcggtattttttatggcaaactttactcttccagcatccgtttctaaaaaaatattaacgagttccatttatatcatccaatattattgaaatgacgttgatggacagatgatacaaataagaaggtacggtacctttgtccaccatctcctccaattcatgctctattttgtcattaactttaatgtatgaaaacagtacgccacatgcttccatgacagtgtgtaacactttggatacaaaatgtttgacattagtataattgttcaagactgtcaatctataatagatagtagctataatatattctatgatggtattgaagaagatgacaaccttggcatattgatcatttaacacagacatggtatcaacagatagcttgaatgaaagagaatcagtaattggaataagcgtcttctcgatagagtgtccgtataccaacatgtctgatattttgatgtattccattaaattatttagttttttctttttattctcgttaaacagcatttctgtcaacggaccccaacatcgttgaccgattaagttttgattgatttttccgtgtaaggcgtatctagtcagatcgtatagcctatccaataatccatcatctgtgcgtagatcacatcgtacactttttaattctctatagaagagcgacagacatctggagcaattacagacagcaatttctttattctctacagatgtaagatacttgaagacattcctatgatgatgcagaattttggataacacggtattgatggtatctgttaccataattcctttgatggctgatagtgtcagagcacaagatttccaatctttgacaatttttagcaccattatctttgttttgatatctatatcagacagcatggtgcgtctgacaacacagggattaagacggaaagatgaaatgattctctcaacatcttcaatagataccttgctattttttctggcattatctatatgtgcgagaatatcctctagagaatcagtatcctttttgatgatagtggatctcaatgacatgggacgtttaaaccttcttattctatcaccagattgcatggtgatttgtcttctttcttttatcataatgtaatctctaaattcatcggcaaattgtctatatctaaaatcataatatgagatgtttacctctacaaatatctgttcgtccaatgttagagtatttacatcagttttgtattccaaattaaacatggcaacggatttaattttatattcctctattaagtcctcgtcgataataacagaatgtagataatcatttaatccatcgtacatggttggaagatgcttgttgacaaaatctttaattgtcttgatgaaggtgggactatatctaacatcttgattaataaaatttataacattgtccataggatactttgtaactagttttatacacatctcttcatcggtaagtttagacagaatatcgtgaacaggtggtatattatattcatcagatatacgaagaacaatgtccaaatctatattgtttaatatattatatagatgtagcgtagctcctacaggaatatctttaactaagtcaatgatttcatcaaccgttagatctattttaaagttaatcatataggcattgatttttaaaaggtatgtagccttgactacattctcattaattaaccattccaagtcactgtgtgtaagaagattatattctatcataagcttgactacatttggtcccgataccattaaagaattcttatgatataaggaaacagcttttaggtactcatctactctacaagaattttggagagccttaacgatatcagtgacgtttattatttcaggaggaaaaaacctaacattgagaatatcggaattaatagcttccagatacagtgattttggcaatagtccgtgtaatccataatccagtaacacgagctggtgcttgctagacaccttttcaatgtttaatttttttgaaataagctttgataaagccttcctcgcaaattccggatacatgaacatgtcggcgacatgattaagtattgttttttcattattttctcaataccccaatagatgatagaatatcacccaatgcgtccatgttgtctatttccaacaggtcgctatatccaccaatagaagtttttccaaaaaagattctaggaacagttctaccaccagtaatttgttcaaaatagtcacgcaattcattttcgggtttaaattctttaatatcgacaatttcatacgctcctcttttgaaactaaacttatttagaatatccagtgcatttctacaaaaaggacatgtatacttgacaaaaattgtcactttgttattggccaacctttgttgtacaaattcctcggccattttaatatttaagtgatataaaactatctcgacttatttaactctttagtcgagatatatggacgcagatagctatatgatagccaactacagaaggcaaacgctataaaaaacataattacgacgagcatatttataaatatttttattcagcattacttgatatagtaatattaggcacagtcaaacattcaaccactctcgatacattaactctctcattttctttaacaaattctgcaatatcttcgtaaaaagattcttgaaactttttagaatatctatcgactctagatgaaatagcgttcgtcaacatactatgttttgtatacataaaggcgcccattttaacagtttctagtgacaaaatgctagcgatcctaggatcctttagaatcacatagattgacgattcgtctctcttagtaactctagtaaaataatcatacaatctagtacgcgaaataatattatccttgacttgaggagatctaaacaatctagttttgagaacatcgataagttcatcgggaatgacatacatactatctttaatagaactcttttcatccagttgaatggattcgtccttaaccaactgattaatgagatcttctattttatcattttccagatgatatgtatgtccattaaagttaaattgtgtagcgcttctttttagtctagcagccaatactttaacatcactaatatcgatatacaaaggagatgatttatctatggtattaagaattcgtttttcgacatccgtcaaaaccaattcctttttgcctgtatcatccagttttccatcctttgtaaagaaattattttctactagactattaataagactgataaggattcctccataattgcacaatccaaactttttcacaaaactagactttacaagatctacaggaatgcgtacttcaggttttttagcttgtgattttttcttttgcggacattttcttgtgaccaactcatctaccatttcattgattttagcagtgaaataagctttcaatgcacgggcactgatactattgaaaacgagttgatcttcaaattccgccatttaagttcaccaaacaacttttaaatacaaatatatcaatagtagtagaataagaactataaaaaaaataataattaaccaataccaaccccaacaaccggtattattagttgatgtgactgttttctcatcacttagaacagatttaacaatttctataaagtctgtcaaatcatcttccggagaccccataaatacaccaaatatagcggcgtacaacttatccatttatacattgaatattggcttttctttatcgctatcttcatcatattcatcatcaatatcaacaagtcccagattacgagccagatcttcttctacattttcagtcattgatacacgttcactatctccagagagtccgataacgttagccaccacttctctatcaatgattagtttcttgagcgcgaaagtaatttttgtttccgttccggatctatagaagacgataggtgtgataattgccttggccaattgtctttctcttttactgagtgattctagttcaccttctatagatctgagaatggatgattctccagtcgaaacatattctaccatggatccgtttaatttgttgatgaagatggattcatccttaaatgttttctctgtaatagtttccaccgaaagactatgcaaagaatttggaatgcgttccttgtgcttaatgtttccatagacggcttctagaagttgatacaacataggactagccgcggtaacttttatttttagaaagtatccatcgcttctatcttgtttagatttatttttataaagtttagtctctccttccaacataataaaagtggaagtcatttgactagataaactatcagtaagttttatagagatagacgaacaattagcgtattgagaagcatttagtgtaacgtattcgatacattttgcattagatttactaatcgattttgcatactctataacacccgcacaagtctgtagagaatcgctagatgcagtaggtcttggtgaagtttcaactctcttcttgattaccttactcatgattaaacctaaataattgtactttgtaatataatgatatatattttcactttatctcatttgagaataaaaatgtttttgtttaaccactgcatgatgtacagatttcggaatcgcaaaccaccagtggttttattttatccttgtccaatgtgaattgaatgggagcggatgcgggtttcgtacgtagatagtacattcccgtttttagaccgagactccatccgtaaaaatgcatactcgttagtttggaataactcggatctgctatatggatattcatagattgactttgatcgatgaaggctcccctgtctgcagccatttttatgatcgtcttttgtggaatttcccaaatagttttataaactcgcttaatatcttctggaaggtttgtattctgaatggatccaccatctgccataatcctattcttgatctcatcattccataattttctctcggttaaaactctaaggagatgcggattaactacttgaaattctccagacaatactctccgagtgtaaatattactggtatacggttccaccgactcattatttcccaaaatttgagcagttgatgcagtcggcataggtgccaccaataaactatttctaagaccgtatgttctgattttatcttttagaggttcccaattccaaagatccgacggtacaacattccaaagatcatattgtagaataccgttactggcgtacgatcctacatatgtatcgtatggtccttccttctcagctagttcacaactcgcctctaatgcaccgtaataaatggtttcgaagatcttcttatttagatcttgtgcttccaggctatcaaatggataatttaagagaataaacgcgtccgctaatccttgaacaccaataccgataggtctatgtctcttattagagatttcagcttctggaataggataataattaatatctataattttattgagatttctgacaattactttgaccacatccttcagtttgagaaaatcaaatcgcccatctattacaaacatgttcaaggcaacagatgccagattacaaacggctacctcattagcatccgcatattgtattatctcagtgcaaagattactacacttgatagttcctaaattttgttgattactctttttgttacacgcatccttataaagaatgaatggagtaccagtttcaatctgagattctataatcgctttccagacgactcgagcctttattatagatttgtatctcctttctctttcgtatagtgtatacaatcgttcgaactcgtctccccaaacattgtccaatccaggacattcatccggacacatcaacgaccactctccgtcatccttcactcgtttcataaagagatcaggaatccaaagagctataaatagatctctggttctatgttcctcgtttcctgtattctttttaagatcgaggaacgccataatatcagaatgccacggttccaagtatatggccataactccaggccgtttgtttcctccctgatctatgtatctagcggtgttattataaactctcaacattggaataataccgtttgatataccattggtaccggagatatagcttccactggcacgaatattactaattgatagacctattccccctgccattttagagattaatgcgcatcgttttaacgtgtcatagataccctctatgctatcatcgatcatgttaagtagaaaacagctagacatttggtgacgactagttcccgcattaaataaggtaggagaagcgtgcgtaaaccatttttcagaaagtagattgtacgtctcaatagctgagtctatatcccattgatgaattcctactgcgacacgcattaacatgtgctgaggtctttcaacgatcttgttgtttattttcaacaagtaggatttttccaaagttttaaaaccaaaatagttgtatgaaaagtctcgttcgtaaataataaccgagttgagtttatccttatatttgttaactatatccatggtgatacttgaaataatcggagaatgtttcccatttttaggattaacatagttgaataaatcctccatcacttcactaaatagtttttttgtttccttgtgtagatttgatacggctattctggcggctagaatggcataatccggatgttgtgtagtacaagtggctgctatttcggctgccagagtgtccaattctaccgttgttactccattatatattccttgaataaccttcatagctattttaataggatctatatgatccgtgtttaagccataacataattttctaatacgagacgtgattttatcaaacatgacattttccttgtatccatttcgtttaatgacaaacatttttgttggtgtaataaaaaaattatttaacttttcattaatagggatttgacgtatgtagcgtacaaaatgatcgttcctggtatatagataaagagtcctatatatttgaaaatcgttacggctcgattaaactttaatgattgcatagtgaatatatcattaggatttaactccttgactatcatggcggcgccagaaattaccatcaaaagcattaatacagttatgccgatcgcagttagaacggttatagcatccaccatttatatctaaaaattagatcaaagaatatgtgacaaagtcctagttgtatactgagaattgacgaaacaatgtttcttacatatttttttcttattagtaactgacttaatagtaggaactggaaagctagacttgattattctataagtatagatacccttccaaataatattctctttgataaaagttccagaaaatgtagaattttttaaaaagttatcttttgctattaccaagattgtgtttagacgcttattattaatatgagtgatgaaatccacaccgcctctagatatcgcctttatttccacattagatggtaaatccaatagtgaaactatctttttaggaatgtatggactcgcgtttagaggagtgaacgtcttgggcgtcggaaaggatgattcgtcaaacgaataaacaatttcacaaatggatgttaatgtattagtaggaaattttttgacgctagtggaattgaagattctaatggatgatgttctacctatttcatccgataacatgttaatttccgacaccaacggttttaatatttcgatgatatacggtagtctctctttcggacttatatagcttattccacaatacgagtcattatatactccaaaaaacaaaataactagtataaaatctgtatcgaatgggaaaaacgaaattatcgacataggtatagaatccggaacattgaacgtattaatacttaattctttttctgtggtaagtaccgataggttattgacattgtatggttttaaatattctataacttgagacttgatagatattagtgatgaattgaaaattatttttatcaccacgtgtgtttcaggatcatcgtcgacgcccgtcaaccaaccgaatggagtaaaataaatatcattaatatatgctctagatattagtatttttatcaatcctttgattatcatcttctcgtaggcgaatgattccatgatcaagagtgatttgagaacatcctccggagtattaatgggcttagtaaacagtccatcgttgcaataataaaagttatccaagttaaaggatattatgcattcgtttaaagatatcacctcatctgacggagacaattttttggtaggttttagagactttgaagctacttgtttaacaaagttattcatcgtcgtctactattctatttaattttgtagttaatttatcacatatcacattaattgactttttggtccatttttccatacgtttatattcttttaatcctgcgttatccgtttccgttatatccagggatagatcttgcaagttaaatagaatgctcttaaataatgtcattttcttatccgctaaaaatttaaagaatgtataaacctttttcagagatttgaaacttttaggtggagttctagtacacaatatcataaacaaactaataaacattccacattcagattccaacagctgattaacttccacattaatacagcctattttcgctccaaatgtacattcgaaaaatctgaataaaacatcgatgtcacaatttgtattatccaatacagaatgtttgtgattcgtgttaaaaccatcggagaaggaataaaaataaaaattattatagtggtggaattcagttggaatattgcctccggagtcataaaaggatactaaacattgttttttatcataaattacacatttccaatgagacaaataacaaaatccaaacattacaaatctagaggtagaacttttaattttgtctttaagtatatacgataagatatgtttattcataaacgcgtcaaatttttcatgaatcgctaaggagtttaagaatctcatgtcaaattgtcctatataatccacttcggatccataagcaaactgagagactaagttcttaatacttcgattgctcatccaggctcctctctcaggctctattttcatcttgacgacctttggattttcaccagtatgtattcctttacgtgataaatcatcgattttcaaatccatttgtgagaagtctatcgccttagatactttttcccgtagtcgaggtttaaaaaaatacgctaacggtatactagtaggtaactcaaagacatcatatatagaatggtaacgcgtctttaactcgtcggttaactctttcttttgatcgagttcgtcgctactattgggtctgctcaggtgccccgactctactagttccaacatcataccgataggaatacaagacactttgccggcggttgtagatttatcatatttctccactacatatccgttacaatttgttaaaaatttagatacatctatattgctacataatccagctagtgaatatatatgacataataaattggtaaatcctagttctggtattttactaattactaaatctgtatatctttccatttatcatggaaaagaatttaccagatatcttcttttttccaaactgcgttaatgtattctcttacaaatattcacaagatgaattcagtaatatgagtaaaacggaacgtgatagtttctcattggccgtgtttccagttataaaacatagatggcataacgcacacgttgtaaaacataaaggaatatacaaagttagtacagaagcacgtggaaaaaaagtatctcctccatcactaggaaaacccgcacacataaacctaaccgcgaagcaatatatatacagtgaacacacaataagctttgaatgttatagttttctaaaatgtataacaaatacagaaatcaattcgttcgatgagtatatattaagaggactattagaagctggtaatagtttacagatattttccaattccgtaggtaaacgaacagatactataggtgtactagggaataagtatccatttagcaaaattccattggcctcattaactcctaaagcacaacgagagatattttcagcgtggatttctcatagacctgtagttttaactggaggaactggagtgggtaagacgtcacaggtacccaagttattgctttggtttaattatttatttggtggattctctactctagataaaatcactgactttcacgaaagaccagtcattctatctcttcctaggatagctttagttagattgcatagcaataccattttaaaatcattgggatttaaggtactagatggatctcctatttctttacggtacggatctataccggaagaattaataaacaaacaaccaaaaaaatatggaattgtattttctacccataagttatctctaacaaaactatttagttatggcactcttattatagacgaagttcatgagcatgatcaaataggagatattattatagcagtagcgagaaagcatcatacgaaaatagattctatgtttttaatgactgccacgttagaggatgacagggaacggctaaaagtatttttacctaatcccgcatttatacatattcctggagatacactgtttaaaattagcgaggtatttattcataataagataaatccatcttccagaatggcatacatagaagaagaaaagagaaatttagttactgctatacagatgtatactcctcctgatggatcatccggtatagtctttgtggcatccgttgcacagtgtcacgaatataaatcatatttagaaaaaagattaccgtatgatatgtatattattcatggtaaggtcttagatatagacgaaatattagaaaaagtgtattcatcacctaatgtatcgataattatttctactccttatttggaatccagcgttactatacgcaatgttacacacatttatgatatgggtagagtttttgtccccgctccttttggaggatcgcaacaatttatttctaaatctatgagagatcaacgaaaaggaagagtaggaagagttaatcctggtacatacgtctatttctatgatctgtcttatatgaagtctatacagcgaatagattcagaatttctacataattatatattgtacgctaataagtttaatctaacactccccgaagatttgtttataatccctacaaatttggatattctatggcgtacaaaggaatatatagactcgttcgatattagtacagaaacatggaataaattattatccaattattatatgaagatgatagagtatgctaaactttatgtactaagtcctattctcgctgaggagttggataactttgagaggacgggagaattaactagtattgtacaagaagccattttatctctaaatttacaaattaagattttaaattttaaacataaagatgatgatacgtatatacacttttgtaaaatattattcggtgtctataacggaacaaacgctactatatattatcatagacctctaacgggatatatgaatatgatttcagatactatatttgttcctgtagataataactaaaaattaaactctaatgaccacatctttttttagagatgaaaaattttccacatctccttttgtagacacgactaaacattttgcagaaaaaagtttattagtgtttagataatcgtatacttcatcagtgtagatagtaaatgtgaacagataaaaggtattcttgctcaatagattggtaaattccatagaatatattaatcctttcttcttgagatcccacatcatttcaaccagagacgttttatccaatgatttacctcgtactataccacatacaaaactagattttgcagtgacgtcgtacctggtattcctaccaaacaaaattttacttttagttcttttagaaaattctaaggtagaatctctatttgccaatatgtcatctatggaattaccactagcaaaaaatgatagaaatatatattgatacatcgcagctggttttgatctactatactttaaaaacgaatcagattccataattgcctgtatatcatcagctgaaaaactatgttttacacgtattccttcggcatttctttttaatgatatatcttgtttagacaatgataaagttatcatgtccatgagagacgcgtctccgtatcgtataaatatttcattagatgttagacgcttcattaggggtatacttctataaggtttcttaatcagtccatcattggttgcgtcaagaactactatcggatgttgttgggtatctctagtgttacacatggccttactaaagtttgggtaaataactatgatatctctattaattatagatgcatatatttcattcgtcaaggatattagtatcgacttgctatcgtcattaatacgtgtaatgtaatcatataaatcatgcgatagccaaggaaaatttaaatagatgttcatcatataatcgtcgctataattcatattaatacgttgacattgactaatttgtaatatagcctcgccacgaagaaagctctcgtattcagtttcatcgataaaggataccgttaaatataactggttgccgatagtctcatagtctattaagtggtaagtttcgtacaaatacagaatccctaaaatattatctaatgttggattaatctttaccataactgtataaaatggagacggagtcataactattttaccgtttgtacttactggaatagatgaaggaataatctccggacatgctggtaaagacccaaatgtctgtttgaagaaatccaatgttccaggtcctaatctcttaacaaaaattacgatattcgatcccgatatcctttgcattctatttaccagcatatcacgaactatattaagattatctatcatgtctattctcccaccgttatataaatcgcctccgctaagaaacgttagtatatccatacaatggaatacttcatttctaaaatagtattcgttttctaattctttaatgtgaaatcgtatactagaaagggaaaaattatctttgagttttccgttagaaaagaaccacgaaactaatgttctgattgcgtccgattccgttgctgaattaatggatttacaccaaaaactcatataacttctagatgtagaagcattcgctaaaaaattagtagaatcaaaggatataagtagatgttccaacaagtgagcaattcccaagatttcatctatatcattctcgaatccgaaattagaaattcccaagtagatatcctttttcatccgatcgttgatgaaaatacgaactttattcggtaagacaatcatttactaaggagtaaaataggaagtaatgttcgtatgtcgttatcatcgtataaattaaaggtgtgttttttaccattaagtgacattataattttaccaatattggaattataatataggtgtatttgcgcactcgcgacggttgatgcatcggtaaatatagctgtatctaatgttctagtcggtatttcatcatttcgctgtctaataatagcgttttctctatctgtttccattacagctgcctgaagtttattggtcggataatatgtaaaataataagaaatacatacgaataacaaaaataaaataagatataataaagatgccatttagagatctaattttgtttaacttgtccaaattcctacttacagaagatgaggaatcgttggagatagtgtcttccttatgtagaggatttgaaatatcttataatgacttgataacttactttccagataggaaataccataaatatatttataaagtatttgaacatgtagatttatcggaggaattaagtatggaattccatgatacaactctgagagatttagtctatcttagattgtacaagtattccaagtgtatacggccgtgttataaattaggagataatctaaaaggcatagttgttataaaggacaggaatatttatattagggaagcaaatgatgacttgatagaatatctcctcaaggaatacactcctcagatttatacatattctaatgagcgcgtccccataactggttcaaaattaattctttgtggattttctcaagttacatttatggcgtatacaacgtcgcatataacaacaaataaaaaggtagatgttctcgtttccaaaaaatgtatagatgaactagtcgatccaataaattatcaaatacttcaaaatttatttgataaaggaagcggaacaataaacaaaatactcaggaagatattttattcggtaacaggtggccaaactccataggtagctttttctatttcggattttagaatttccaaattcaccagcgatttatcggttttggtgaaatccaaggatttattaatgtccacaaatgccatttgttttgtctgtggattgtatttgaaaatggaaacgatgtagttagatagatgcgctgcaaagtttcctattagggttccgcgctttacgtcacccagcatacttgaatcaccatcctttaaaaaaaatgataagatatcaacatggagtatatcatactcggattttaattcttctactgactcactgacattttcacaaatactacaatacggtttaccgaaaataatcagtacgttcttcatttatgggtatcaaaaacttaaaatcgttactgctggaaaataaatcactgacgatattagatgataatttatacaaagtatacaatggaatatttgtggatacaatgagtatttatatagccgtcgccaattgtgtcagaaacttagaagagttaactacggtattcataaaatacgtaaacggatgggtaaaaaagggagggcatgtaaccctttttatcgatagaggaagtataaaaattaaacaagacgttagagacaagagacgtaaatattctaaattaaccaaggacagaaaaatgttagaattagaaaagtgtacatccgaaatacaaaatgttaccggatttatggaagaagaaataaaggcagaaatgcaattaaaaatcgataaactcacatttcaaatatatttatctgattctgataacataaaaatatcattgaatgagatactaacacatttcaacaataatgagaatgttacattattttattgtgatgaacgagacgcagaattcgttatgtgtctcgaggctaaaacacatttctctaccacaggagaatggccgttgataataagtaccgatcaggatactatgctatttgcatctactgataatcatcctaagatgataaaaaacttaactcaactgtttaaatatgttccctctgcagaggataactatttagcaaaattaacggcgttagtgaatggatgtgatttctttcctggactctatggggcatctataacacccaccaacttaaacaaaatacaattgtttagtgattttacaatcgataatatagtcactagtttggcaattaaaaattattatagaaagactaactctaccgtagacgtgcgtaatattgttacgtttataaacgattacgctaatttagacgatgtctactcgtatattcctccttgtcaatgcactgttcaagaatttatattttccgcattagatgaaaaatggaatgaatttaaatcatcttatttagagaccgttccgttaccctgtcaattaatgtacgcgttagaaccacgtaaggagattgatgtttcagaagttaaaactttatcatcttatatagatttcgaaaatactaaatcagatatcgatgttataaaatctatatcctcgatcttcggatattctaacgaaaactgtaacacgatagtattcggcatctataaggataatttactactgagtataaataattcattttactttaacgatagtctgttaataaccaatactaaaagtgataatataataaatataggttactagattaaaaatggtgttccaactcgtgtgctctacgtgcggcaaagatatttctcacgaacgatataaattgattatacgaaaaaaatcattaaaggatgtactcgtcagtgtaaagaacgaatgttgtaggttaaaattatctacacaaatagaacctcaacgtaacttaacagtgcaacctctattggatataaactaatatggatccggttaattttatcaagacatatgcgcctagaggttctattatttttattaattataccatgtcattaacaagtcatttgaatccatcgatagaaaaacatgtgggtatttattatggtacgttattatcggaacacttggtagttgaatcaacatatagaaaaggagttcgaatagtcccattggatagtttttttgaaggatatcttagtgcaaaagtatacatgttagagaatattcaagttatgaaaatagcagctgatacgtcattaactttattgggtattccgtatggatttggtcataatagaatgtattgttttaaattggtagctgactgttataaaaatgccggtattgatacatcgtctaaacgaatattaggtaaagatatttttctgagccaaaacttcacagacgataatagatggataaagatatatgattctaataatttaacattttggcaaattgattaccttaaagggtgagttaatatgcataactactcctccgttgttttttccctcgttctttttcttaacgttgtttgccatcactctcataatgtaaagatattctaaaatggtaaacttttgcatatcggacgcagaaattggtataaatgttgtaattgtattatttcccgtcaatggactagtcacagctccatcagttttatatcctttagagtatttctcactcgtgtctagcattctagagcattccatgatctgtttatcgttgatattggccggaaagatagattttttattttttattatattactattggcaattgtagatataacttctggtaaatatttttctaccttttcaatctcttctattttcaagccggctatatattctgctatattgttgctagtatcaataccttttcttgctaagaagtcatatgtggtattcactatatcagttttaactggtagttccattagcctttccacttctgcagaataatcagaaattggttctttaccagaaaatccagctactataataggctcaccgatgatcattggcaaaatcctatattgtaccagattaatgagagcatatttcatttccaataattctgctagttcttgagacattgatttatttgatgaatctagttggttctctagatactctaccatttctgccgcatacaataacttgttagataaaatcagggttatcaaagtgtttagcgtggctagaatagtgggcttgcatgtattaaagaatgcggtagtatgagtaaaccgttttaacgaattatatagtctccagaaatctgtggcgttacatacatgagccgaatgacatcgaagattgtccaatatttttaatagctgctctttgtccattatttctatatttgactcgcaacaattgtagataccattaatcaccgattcctttttcgatgctggacaatagcacaattgtttagctttggactctatgtattcagaattaatagatatatctctcaatacagattgcactatacattttgaaactatgtcaaaaattgtagaacgacgctgttctgcagccatttaactttaaataatttacaaaaatttaaaatgagcatccgtataaaaatcgataaactgcgccaaattgtggcatatttttcagagttcagtgaagaagtgtctataaatgtagactcgacggatgagttaatgtatatttttgccgccttgggcggatctgtaaacatttgggcaattatacctctaagtgcatcagtgttttaccgaggagccgaaaatattgtgtttaatcttcctgtgtccaaggtaaaatcgtgtttgtgtagttttcacaatgatgccatcatagatatagaacctgatctggaaaataatctagtaaaactttctagttatcatgtagtaagtgtcgattgtaacaaggaactgatgcctattaggacagatactactatttgtctaagtatagatcaaaagaaatcttacgtgtttaattttcacaagtatgaagaaaaatgttgtggtagaaccgtcattcatctagaatggttgttgggctttatcaagtgtattagtcagcatcagcatctggctattatgtttaaagatgacaatattattatgaagactcctggtaatactgatgcgttttccagggaatattctatgactgaatgttctcaagaactacaaaagttttctttcaaaatagctatctcgtctctcaacaaactacgaggattcaaaaagagagtcaatgtttttgaaactagaatcgtaatggataatgacgataacattttaggaatgttgttttcggatagagttcaatcctttaagatcaacatctttatggcgtttttagattaatactttcaatgagataaatatgggtggcggagtaagtgttgagctccctaaacgggatccgcctccgggagtacccactgatgagatgttattaaacgtggataaaatgcatgacgtgatagctcccgctaagcttttagaatatgtgcatataggaccactagcaaaagataaagaggataaagtaaagaaaagatatccagagtttagattagtcaacacaggacccggtggtctttcggcattgttaagacaatcgtataatggaaccgcacccaattgctgtcgcacttttaatcgtactcattattggaagaaggatggaaagatatcagataagtatgaagagggtgcagtattagaatcgtgttggccagacgttcacgacactggaaaatgcgatgttgatttattcgactggtgtcagggggatacgttcgatagaaacatatgccatcagtggatcggttcagcctttaataggagtaatagaactgtagagggtcaacaatcgttaataaatctgtataataagatgcaaacattatgtagtaaagatgctagtgtaccaatatgcgaatcatttttgcattatttacgcgcacacaatacagaagatagcaaagagatgatcgattatattctaagacaacagtctgcggactttaaacagaaatatatgagatgtagttatcccactagagataagttagaagagtcattaaaatatgcggaacctcgagaatgttgggatccagagtgttcgaatgccaatgttaatttcttactaacacgtaattataataatttaggactttgcaatattgtacgatgtaataccagcgtgaacaacttacagatggataaaacttcctcattaagattgtcatgtggattaagcaatagtgatagattttctactgttcccgtcaatagagcaaaagtagttcaacataatattaaacactcgttcgacctaaaattgcatttgatcagtttattatctctcttggtaatatggatactaattgtagctatttaaatgggtgccgcggcaagcatacagacgacggtgaatacactcagcgaacgtatctcgtctaaattagaacaagaagcgaacgctagtgctcaaacaaaatgtgatatagaaatcggaaatttttatatccgacaaaaccatggatgtaacctcactgttaaaaatatgtgctctgcggacgcggatgctcagttggatgctgtgttatcagccgctacagaaacatatagtggattaacaccggaacaaaaagcatacgtgccagctatgtttactgctgcgttaaacattcagacgagtgtaaacactgttgttagagattttgaaaattatgtgaaacagacttgtaattctagcgcggtcgtcgataacaaattaaagatacaaaacgtaatcatagatgaatgttacggagccccaggatctccaacaaatttggaatttattaatacaggatctagcaaaggaaattgtgccattaaagcgttgatgcaattgacgactaaggccactactcaaatagcacctagacaagttgctggtacaggagttcagttttatatgattgttatcggtgttataatattggcagcgttgtttatgtactatgccaagcgtatgttgttcacatccaccaatgataaaatcaaacttattttagccaataaggaaaacgtccattggactacttacatggacacattctttagaacttctccgatggttattgctaccacggatatgcaaaactgaaaatatattgataatattttaatagattaacatggaagttatcgctgatcgtctagacgatatagtgaaacaaaatatagcggatgaaaaatttgtagattttgttatacacggtctagagcatcaatgtcctgctatacttcgaccattaattaggttgtttattgatatactattatttgttatagtaatttatatttttacggtacgtctagtaagtagaaattatcaaatgttgttggtggtgctagtcatcacattaactattttttattactttatactataatagtactagactgacttctaacaaacatctcacctgccataaataaatgcttgatattaaagtcttctatttctaacactattccatctgtggaaaataatactctgacattatcgctaattgacacatcggtgagtgatatgcctataaagtaataatcttctttgggcacatataccagtgtaccaggttctaacaacctatttactggtgctcctgtagcatactttttctttaccttgagaatatccatcgtttgcttggtcaatagcgatatgtgattttttatcaaccactcaaaaaagtaattggagtgttcatatcctctacgggctattgtctcatggccgtgtatgaaatttaagtaacacgactgtggtagatttgttctatagagccgattgccgcaaatagatagaactaccaatatgtctgtacaaatgttaaacattaattgattaacagaaaaaacaatgttcgttctgggaatagaaaccagatcaaaacaaaattcgttagaatatatgccacgtttatacatggaatataaaataactacagtttgaaaaataacagtatcatttaaacatttaacttgcggggttaatctcacaactttactgtttttgaactgttcaaaatatagcatcgatccgtgagaaatacgtttagccgcctttaatagaggaaatcccaccgcctttctggatctcaccaacgacgatagttctgaccagcaactcatttcttcatcatccacctgttttaacatataataggcaggagatagatatccgtcattgcaatattccttctcgtaggcacacaatctaatattgataaaatctccattctcttctctgcatttattatcttgtctcggtggctgattaggctgtggtcttggtttaggctttggtatatcgttgttgaatctattttggtcattaaatctttcatttcttcctggtatatttttatcacctcgtttggttggatttttgtctatattatcgtttgtaacatcggtacgggtattcatttatcacaaaaaaaacttctctaaatgagtctactgctagaaaacctcatcgaagaagataccatattttttgcaggaagtatatctgagtatgatgatttacaaatggttattgccggcgcaaaatccaaatttccaagatctatgctttctatttttaatatagtacctagaacgatgtcaaaatatgagttggagttgattcataacgaaaatatcacaggagcaatgtttaccacaatgtataatataagaaacaatttgggtctaggagatgataaactaactattgaagccattgaaaactatttcttggatcctaacaatgaagttatgcctcttattattaataatacggatatgactgccgtcattcctaaaaaaagtggtaggagaaagaataagaacatggttatcttccgtcaaggatcatcacctatcttgtgcattttcgaaactcgtaaaaagattaatatttataaagaaaatatggaatccgcgtcgactgagtatacacctatcggagacaacaaggctttgatatctaaatatgcgggaattaatgtcctgaatgtgtattctccttccacatccataagattgaatgccatttacggattcaccaataaaaataaactagagaaacttagtactaataaggaactagaatcgtatagttctagccctcttcaagaacccattaggttaaatgattttctgggactattggaatgtgttaaaaagaatattcctctaacagatattccgacaaaggattgattactataaatggagaatgttcctaatgtatactttaatcctgtgtttatagagcccacgtttaaacattctttattaagtgtttataaacacagattaatagttttatttgaagtattcgttgtattcattctaatatatgtattttttagatctgaattaaatatgttcttcatgcctaaacgaaaaatacccgatcctattgatagattacgacgtgctaatctagcgtgtgaagacgataaattaatgatctatggattaccatggatgacaactcaaacatctgcgttatcaataaatagtaaaccgatagtgtataaagattgtgcaaagcttttgcgatcaataaatggatcacaaccagtatctcttaacgatgttcttcgcagatgatgattcattttttaagtatttggctagtcaagatgatgaatcttcattatctgatatattgcaaatcactcaatatctagactttctgttattattattgatccaatcaaaaaataaattagaagctgtgggtcattgttatgaatctctttcagaggaatacagacaattgacaaaattcacagactttcaagattttaaaaaactgtttaacaaggtccctattgttacagatggaagggtcaaacttaataaaggatatttgttcgactttgtgattagtttgatgcgattcaaaaaagaatcctctctagctaccaccgcaatagatcctgttagatacatagatcctcgtcgtgatatcgcattttctaacgtgatggatatattaaagtcgaataaagtgaacaataattaattctttattgtcatcatgaacggcggacatattcagttgataatcggccccatgttttcaggtaaaagtacagaattaattagacgagttagacgttatcaaatagctcaatataaatgcgtgactataaaatattctaacgataatagatacggaacgggactatggacgcatgataagaataattttgaagcattggaagcaactaaactatgtgatgtcttggaatcaattacagatttctccgtgataggtatcgatgaaggacagttctttccagacattgttgaattctgtgagcgtatggcaaacgaaggaaaaatagttatagtagccgcactcgatgggacatttcaacgtaaaccgtttaataatattttgaatcttattccattatctgaaatggtggtaaaactaactgctgtgtgtatgaaatgctttaaggaggcttccttttctaaacgattgggtgaggaaaccgagatagagataataggaggtaatgatatgtatcaatcggtgtgtagaaagtgttacatcgactcataatattatattttttatctaaaaaactaaaaataaacattgattaaattttaatataatacttaaaaatggatgttgtgtcgttagataaaccgtttatgtattttgaggaaattgataatgagttagattacgaaccagaaagtgcaaatgaggtcgcaaaaaaactaccgtatcaaggacagttaaaactattactaggagaattattttttcttagtaagttacagcgacacggtatattagatggtgccaccgtagtgtatataggatctgctcccggtacacatatacgttatttgagagatcatttctataatttaggagtgatcatcaaatggatgctaattgacggccgccatcatgatcctattttaaatggattgcgtgatgtgactctagtgactcggttcgttgatgaggaatatctacgatccatcaaaaaacaactgcatccttctaagattattttaatttctgatgtgagatccaaacgaggaggaaatgaacctagtacggcggatttactaagtaattacgctctacaaaatgtcatgattagtattttaaaccccgtggcatctagtcttaaatggagatgcccgtttccagatcaatggatcaaggacttttatatcccacacggtaataaaatgttacaaccttttgctccttcatattcagctgaaatgagattattaagtatttataccggtgagaacatgagactgactcgagttaccaaattagacgctgtaaattatgaaaaaaagatgtactaccttaataagatcgtccgtaacaaagtagttgttaactttgattatcctaatcaggaatatgactattttcacatgtactttatgctgaggaccgtgtactgcaataaaacatttcctactactaaagcaaaggtactatttctacaacaatctatatttcgtttcttaaatattccaacaacatcaactgaaaaagttagtcatgaaccaatacaacgtaaaatatctagcaaaaattctatgtctaaaaacagaaatagcaagagatccgtacgcggtaataaatagaaacgtactactgagatatactaccgatatagagtataatgatttagttactttaataaccgttagacataaaattgattctatgaaaactgtgtttcaggtatttaacgaatcatccataaattatactccggttgatgatgattatggagaaccaatcattataacatcgtatcttcaaaaaggtcataacaagtttcctgtaaattttctatacatagatgtggtaatatctgacttatttcctagctttgttagactagatactacagaaactaatatagttaatagtgtactacaaacaggcgatggtaaaaagactcttcgtcttcccaaaatgttagagacggaaatagttgtcaagattctctatcgccctaatataccattaaaaattgttagatttttccgcaataacatggtaactggagtagagatagccgatagatctgttatttcagtcgctgattaatcaattagtagagatgagataagaacattataataatcaataatatatcttatatcttatatcttatatcttatatcttgtttagaaaaatgctaatattaaaatagctaacgctagtaatccaatcggaagccatttgatatctataatagggtatctaatttcctgatttaaatagcggacagctatattctcggtagctactcgtttggaatcacaaacattatttacatctaatttactatctgtaatggaaacgtttcccaatgaaatggtacaatccgatacattgcattttgttatatttttttttaaagaggctggtaacaacgcatcgcttcgtttacatggctcgtaccaacaataatagggtaatcttgtatctattcctatccgtactatgcttttatcaggataaatacatttacatcgtatatcgtctttgttagcatcacagaatgcataaatttgttcgtccgtcatgataaaaatttaaagtgtaaatataactattatttttatagttgtaataaaaagggaaatttgattgtatactttcggttctttaaaagaaactgacttgataaaaatggctgtaatctctaaggttacgtatagtctatatgatcaaaaagagattaatgctacagatattatcattagtcatgttaaaaatgacgacgatatcggtaccgttaaagatggtagactaggtgctatggatggggcattatgtaagacttgtgggaaaacggaattggaatgtttcggtcactggggtaaagtaagtatttataaaactcatatagttaagcctgaatttatttcagaaattattcgtttactgaatcatatatgtattcactgcggattattgcgttcacgagaaccgtattccgacgatattaacctaaaagagttatcgggacacgctcttaggagattaaaggataaaatattatccaagaaaaagtcatgttggaacagtgaatgtatgcaaccgtatcaaaaaattactttttcaaagaaaaaggtttgtttcgtcaacaagttggatgatattaacgttcctaattctctcatctatcaaaagttaatttctattcatgaaaagttttggccattattagaaattcatcaatatccagctaacttattttatacagactactttcccatccctccgttgattattagaccggctattagtttttggatagatagtatacccaaagagaccaatgaattaacttacttattaggtatgatcgttaagaattgtaacttgaatgctgatgaacaggttatccagaaggcggtaatagaatacgatgatattaaaattatttctaataacactaccagtatcaatttatcatatattacatccggcaaaaataatatgattagaagttatatcgtcgcccgacgaaaagatcagaccgctagatctgtaattggtcccagtacatctatcaccgttaatgaggtaggaatgcccgcatatattagaaatacacttacagaaaagatatttgttaatgcctttacagtggataaagttaaacaactattagcgtcaaaccaagttaaattttactttaataaacgattaaaccaattaacaagaatacgccaaggaaagtttattaaaaataaaatacatttattgcctggtgattgggtagaagtagctgttcaagaatatacaagtattatttttggaagacagccgtctctacatagatacaacgtcatcgcttcatctatcagagctaccgaaggagatactatcaaaatatctcccggaattgccaactctcaaaatgctgatttcgacggggatgaggaatggatgatattagaacaaaatcctaaagctgtaattgaacaaagtattcttatgtatccgacgacgttactcaaacacgatattcatggagcccccgtttatggatctattcaagatgaaatcgtagcagcgtattcattgtttaggatacaagatctttgtttagatgaagtattgaacatcttggggaaatatggaagagagttcgatcctaaaggtaaatgtaaattcagcggtaaagatatctatacttacttgataggtgaaaagattaattatccgggtctcttaaaggatggtgaaattattgcaaacgacgtagatagtaattttgttgtggctatgaggcatctgtcattggctggactcttatccgatcataagtcgaacgtggaaggtatcaactttattatcaagtcatcttatgtttttaagagatatctatctatttacggttttggggtgacattcaaagatctgagaccaaattcgacgttcactaataaattggaggccatcaacgtagaaaaaatagaacttatcaaagaagcatacgccaaatatctcaacgatgtaagagacgggaaaatagttccattatctaaagctttagaggcggactatgtggaatccatgttatccaacttgacaaatcttaatatccgagagatagaagaacatatgagacaaacgctgatagatgatccagataataacctcctgaaaatggccaaagcgggttataaagtaaatcccacagaactaatgtatattctaggtacgtatggacaacaaaggattgatggtgaaccagcagagactcgagtattgggtagagttttaccttactatcttccagactctaaggatccagaaggaagaggttatattcttaattctttaacaaaaggattaacgggttctcaatattacttttcgatgctggttgcaagatctcaatctactgatatcgtctgtgaaacatcacgtaccggaacactggctagaaaaatcattaaaaagatggaggatatggtggtcgacggatacggacaagtagttataggtaatacgctcatcaagtacgccgccaattataccaaaattctaggctcagtatgtaaacctgtagatcttatctatccagatgagtccatgacttggtatttggaaattagtgctctgtggaataaaataaaacagggattcgtttactctcagaaacagaaacttgcaaagaagacattggcgccgtttaatttcctagtattcgtcaaacccaccactgaggataatgctattaaggttaaggatctgtacgatatgattcataacgtcattgatgatgtgagagagaaatacttctttacggtatctaatatagattttatggagtatatattcttgacgcatcttaatccttctagaattagaattacaaaagaaacggctatcactatctttgaaaagttctatgaaaaactcaattatactctaggtggtggaactcctattggaattatttctgcacaggtattgtctgagaagtttacacaacaagccctgtccagttttcacactactgaaaaaagtggtgccgtcaaacaaaaacttggtttcaacgagtttaataacttgactaatttgagtaagaataagaccgaaattatcactctggtatccgatgatatctctaaacttcaatctgttaagattaatttcgaatttgtatgtttgggagaattaaatccagacatcactcttcgaaaagaaacagataggtatgtagtagatataatagtcaatagattatacatcaagagagcagaaataaccgaattagtcgtcgaatatatgattgaacgatttatctcctttagcgtcattgtaaaggaatggggtatggagacattcattgaggacgaggataatattagatttactgtctacctaaatttcgttgaaccggaagaattgaatcttagtaagtttatgatggttcttccgggtgccgccaacaagggaaagattagtaaattcaagattcctatctctgactatacgggttatgacgacttcaatcaaacaaaaaagctcaataagatgactgtagaactcatgaatctaaaagaattgggttctttcgatttggaaaacgtcaacgtgtatcctggagtatggaatacatacgatatcttcggtatcgaggccgctcgtgaatacttgtgcgaagccatgttaaacacctatggagaagggttcgattatctgtatcagccttgtgatcttctcgctagtttactatgtgctagttacgaaccagaatcagtgaataaattcaagttcggcgcagctagtactcttaagagagctacgttcggagacaataaagcattgttaaacgcggctcttcataaaaagtcagaacctattaacgataatagtagctgccacttttttagcaaggtccctaatataggaactggatattacaaatactttatcgacttgggtcttctcatgagaatggaaaggaaactatctgataagatatcttctcaaaagatcaaggaaatggaagaaacagaagacttttaattcttatcaataacatatttttctatgatctgtcttttaaacgatggattttccacaaatgcgcctctcaagtccctcatagaatgatacacgtataaaaaatatagcataggcgatgactccttatttttagacattagatatgccaaaatcatagccccgcttctatttactcccgcagcacaatgaaccaacacgggctcgtttcgttgatcacatttagataaaaaggcggttacgtcgtcaaaatatttactaatatcggtagttgtatcatctaccaacggtatatgaataatattaatattagagttaggtaatgtatatttatccatcgtcaaatttaaaacatatttgaacttaacttcagatgatggtgcatccatagcatttttataatttcccaaatacacattattggttacccttgtcattatagtgggagatttggctctgtgcatatctccagttgaacgtagtagtaagtatttatacaaacttttcttatccatttataacgtacaaatggataaaactactttatcggtaaacgcgtgtaatttagaatacgttagagaaaaggctatagtaggcgtacaagcagccaaaacatcaacacttatattctttgttattatattggcaattagtgcgctattactctggtttcagacgtctgataatccagtctttaatgaattaacgagatatatgcgaattaaaaatacggttaacgattggaaatcattaacggatagcaaaacaaaattagaaagtgatagaggtagacttctagccgctggtaaggatgatatattcgacttcaaatgtgtggatttcggcgcctattttatagctatgcgattggataagaaaacatatctgccgcaagctattaggcgaggtactggagacgcgtggatggttaaaaaggcggcaaaggtcgatccatctgctcaacaattttgtcagtatttgataaaacacaagtctaataatgttattacttgtggtaatgagatgttaaatgaattaggttatagcggttattttatgtcaccgcattggtgttccgattttagtaatatggaatagtgttagataaatgcggtaacgaatgttcctgtaaggaaccataacagcttagatttaacgttaaagatgagcataaacataataaacaaaattacaatcaaacctataacattaatatcaaacaatccaaaaaatgaaatcagtggagtagtaaacgcgtacataactcctggataacgtttagcagctgccgttcctattctagaccaaaaattcggtttcatgttttcgaaacggtattctgcaacaagtcgaggatcgtgttctacatatttggcggcgttatccagtatctgcctattgatcttcatttcgttttcgattctggctatttcaaaataaaatcccgatgatagacctccagactttataatttcatctacgatgttcagcgccgtagtaactctaataatataggctgataagctaacatcataccctcctgtatatgtgaatatggcatgatttttgtccattacaagctcggttttaactttattgcctgtaataatttctctcatctgtaggatatctatttttttgtcatgcattgccttcaagacgggacgaagaaacgtaatatcctcaataacgttatcgttttctacaataactacatattctacctttttattttctaactcggtaaaaaaattagaatcccatagggctaaatgtctagcgatatttcttttcgtttcttctgtacacatagtgttacaaaaccctgaaaagaagtgagtatacttgtcatcatttctaatgtttcctccagtccactgtataaacgcataatccttgtaatgatctggatcatccttgactaccacaacatttcttttttctggcataacttcgttgtcctttacatcatcgaacttctgatcattaatatgctcatgaacattaggaaatgtttctgatggaggtctatcaataactggcacaacaataacaggagttttcaccgccgccatttagttattgaaattaatcatatacaactctttaatacgagttatattttcgtctatccattgtttcacattgacatatttcgacaaaaagatataaaatgcgtattccaatgcttctctgtttaatgaattactaaaatatacaaacacgtcactgtctggcaataaatgatatcttagaatattgtaacaatttattttgtattgcacatgttcgtgatctatgagttcttcttcgaatggcataggatctccgaatctgaaaacgtataaataggagttagaataataatatttgagagtattggtaatatataaactctttagcggtataattagtttttttctctcaatttctatttttagatgtgatggaaaaatgactaattttgtagcattagtatcatgaactctaatcaaaatcttaatatcttcgtcacacgttagctctttgaagtttttaagagatgcatcagttggttctacagatggagtaggtgcaacaattttttgttctacacatgtatgtactggagccattgttttaactataatggtgcttgtatcgaaaaactttaatgcagatagcggaagctcttcgccgcgactttctacgtcgtaattgggttctaacgccgatctctgaatggatactagttttctaagttctaatgtgattctctgaaaatgtaaatccaattcctccggcattatagatgtgtatacatcggtaaataaaactatagtatccaacgatcccttctcgcaaattctagtcttaaccaaaaaatcgtatataaccacggagatggcgtatttaagagtggattcttctaccgttttgttcttggatgtcatataggaaactataaagtccgcactactgttaagaatgattactaacgcaactatatagtttaaattaagcattttggaaacataaaataactctgtagacgatacttgactttcgaataagtttgcagacaaacgaagaaagaacagacctctcttaatttcagaagaaaactttttttcgtattcctgacgtctagagtttatatcaataagaaagttaagaattagtcggttaatgttgtatttcattacccaagtttgagatttcataatattatcaaaagacatgataatattaaagataaagcgctgactatgaacgaaatagctatatggttcgctcaagaatatagtcttgttaaacgtggaaacgataactgtatttttaatcacgtcagcggcatctaaattaaatataggtatatttattccacacactctacaatatgccacaccatcttcataataaataaattcgttagcaaaattattaattttagtgaaatagttagcgtcaactttcatagcttccttcaatctaatttgatgctcacacggtgcgaattccactctaacatcccttttccatgcctcaggttcatcgatctctataatatctagttttttgcgtttcacaaacacaggctcgtctctcgcgatgagatctgtatagtaactatgtaaatgataactagatagaaagatgtagctatatagatgacgatcctttaagagaggtataataactttaccccaatcagatagactgttgttatggtcttcggaaaaagaatttttataaatttttccagtattttccaaatatacgtacttaacatctaaaaaatccttaatgataataggaatggataatccgtctattttataaagaaatacatatcgcacattatacttttttttggaaatgggaataccgatgtgtctacataaatatgcaaagtctaaatattttttagagaatcttagttggtccaaattcttttccaagtacggtaatagatttttcatattgaacggtatcttcttaatctctggttctagttccgcattaaatgatgaaactaagtcactatttttataactaacgattacatcacctctaacatcatcatttaccagaatactgatcttcttttgtcgtaaatacatgtctaatgtgttaaaaaaaagatcatacaagttatacgtcatttcatctgtggtattcttgtcattgaaggataaactcgtactaatctcttctttaacagcctgttcaaatttatatcctatatacgaaaaaatagcaaccagtgtttgatcatccgcgtcaatattctgttctatcgtagtgtataacaatcgtatatcttcttctgtgatagtcgatacgttataaaggttgataacgaaaatatttttatttcgtgaaataaagtcatcgtaggattttggacttatattcgcgtctagtagatatgcttttatttttggaatgatctcaattagaatagtctctttagagtccatttaaagttacaaacaactaggaaattggtttatgatgtataatttttttagtttttatagattctttattctatacttaaaaaatgaaaataaatacaaaggttcttgagggttgtgttaaattgaaagcgagaaataatcataaattatttcattatcgcgatatccgttaagtttgtatcgtaatggcgtggtcaattacgaataaagcggatactagtagcttcacaaagatggctgaaatcagagctcatctaaaaaatagcgctgaaaataaagataaaaacgaggatattttcccggaagatgtaataattccatctactaagcccaaaaccaaacgagccactactcctcgtaaaccagcggctactaaaagatcaaccaaaaaggaggaagtggaagaagaagtagttatagaggaatatcatcaaacaactgaaaaaaattctccatctcctggagtcagcgacattgtagaaagcgtggccgctgtagagctcgatgatagcgacggggatgatgaacctatggtacaagttgaagctggtaaagtaaatcatagtgctagaagcgatctctctgacctaaaggtggctaccgacaatatcgttaaagatcttaagaaaattattactagaatctctgcagtatcgacggttctagaggatgttcaagcagctggtatctctagacaatttacttctatgactaaagctattacaacactatctgatctagtcaccgagggaaaatctaaagttgttcgtaaaaaagttaaaacttgtaagaagtaaatgcgtgcacttttttataaagatggtaaactctttaccgataataattttttaaatcctgtatcagacgataatccagcgtatgaggttttgcaacatgttaaaattcctactcatttaacagatgtagtagtatatgaacaaacgtgggaggaggcgttaactagattaatttttgtgggaagcgattcaaaaggacgtagacaatacttttacggaaaaatgcatgtacagaatcgcaacgctaaaagagatcgtatttttgttagagtatataacgttatgaaacgaattaattgttttataaacaaaaatataaagaaatcgtccacagattccaattatcagttggcggtttttatgttaatggaaactatgttttttattagatttggtaaaatgaaatatcttaaggagaatgaaacagtagggttattaacactaaaaaataaacacatagaaataagtcccgatgaaatagttatcaagtttgtaggaaaggacaaagtttcacatgaatttgttgttcataagtctaatagactatataaaccgctattgaaactgacggatgattctagtcccgaagaatttctgttcaacaaactaagtgaacgaaaggtatacgaatgtatcaaacagtttggtattagaatcaaggatctccgaacgtatggagtcaattatacgtttttatataatttttggacaaatgtaaagtccatatctcctcttccgtcaccaaaaaagttaatagcgttaactatcaaacaaactgctgaagtggtaggtcatactccatcaatttcaaaaagagcttatatggcaacgactattttagaaatggtaaaggataaaaattttttagatgtagtatctaaaactacgttcgatgaattcctatctatagtcgtagatcacgttaaatcatctacggatggatgatatagatctttacacaaataattacaagaccgataaatggaaatggataagcgtataaaatctctcgcaatgaccgctttctttggggagctaagcacattagatattatggcattgataatgtctatatttaaacgccatccaaacaataccattttttcagtggataaggatggtcagtttatgattgatttcgaatacgataattataaggcttctcaatatttggatctgaccctcactccgatatttggagatgaatgcaagactcacgcatcgagtatagccgaacaattggcgtgtgcggatattattaaagaggatattagcgaatacatcaaaactactccccgtcttaaacgatttataaaaaaataccgcaatagatcagatactcgtatcagtcgagatacagaaaagcttaaaatagctctagctaaaggcatagattacgaatatataaaagacgcttgttaataagtaaatgaaaaaaaactagtcgtttataataaaacacgatatggatgccaacgtagtatcatcttctactattgcgacgtatatagacgctttagcgaagaatgcttcagaattagaacagaggtctaccgcatacgaaataaataatgaattggaactagtatttattaagccgccattgattactttgacaaatgtagtgaatatctctacgattcaggaatcgtttattcgatttaccgttactaataaggaaggtgttaaaattagaactaagattccattatctaaggtacatggtctagatgtaaaaaatgtacagttagtagatgctatagataacatagtttgggaaaagaaatcattagtgacggaaaatcgtcttcacaaagaatgcttgttgagactatcgacagaggaacgtcatatatttttggattacaagaaatatggatcctctatccgactagaattagtcaatcttattcaagcaaaaacaaaaaactttacgatagactttaagctaaaatattttctaggatccggtgcccaatctaaaagttctttgttgcacgctattaatcatccaaagtcaaggcctaatacatctctggaaatagaattcacacctagagacaatgaaacagttccatatgatgaactaataaaggaattgacgactctctcgcgtcatatatttatggcttctccagagaatgtaattctttctccgcctattaacgcgcctataaaaacctttatgttgcctaaacaagatatagtaggtttggatctggaaaatctatatgccgtaactaagactgacggcattcctataactatcagagttacatcaaacgggttgtattgttattttacacatcttggttatattattagatatcctgttaagagaataatagattccgaagtagtagtctttggtgaggcagttaaggataagaactggaccgtatatctcattaagctaatagagcccgtgaatgctatcagtgatagactagaagaaagtaagtatgttgaatctaaactagtggatatttgtgatcggatagtattcaagtcaaagaaatacgaaggtccgtttactacaactagtgaagtcgtcgatatgttatctacatatttaccaaagcaaccagaaggtgttattctgttctattcaaagggacctaaatctaacattgattttaaaattaaaaaggaaaatactatagaccaaactgcaaatgtagtatttaggtacatgtccagtgaaccaattatctttggagaatcgtctatctttgtagagtataagaaatttagcaacgataaaggctttcctaaagaatatggttctggtaagattgtgttatataacggcgttaattatctaaataatatctattgtttggaatatattaatacacataatgaagtgggtattaagtccgtggttgtacctattaagtttatagcagaattcttagttaatggagaaatacttaaacctagaattgataaaaccatgaaatatattaactcagaagattattatggaaatcaacataatatcatagtcgaacatttaagagatcaaagcatcaaaataggagatatctttaacgaggataaactatcggatgtgggacatcaatacgccaataatgataaatttagattaaatccagaagttagttattttacgaataaacgaactagaggaccgttgggaattttatcaaactacgtcaagactcttcttatttctatgtattgttccaaaacatttttagacgattccaacaaacgaaaggtattggcgattgattttggaaacggtgctgacctggaaaaatacttttatggagagattgcgttattggtagcgacggatccggatgctgatgctatagctagaggaaatgaaagatacaacaaattaaactctggaattaaaaccaagtactacaaatttgactacattcaggaaactattcgatccgatacatttgtctctagtgtcagagaagtattctattttggaaagtttaatatcatcgactggcagtttgctatccattattcttttcatccgagacattatgctaccgtcatgaataacttatccgaactaactgcttctggaggcaaggtattaatcactaccatggacggagacaaattatcaaaattaacagataaaaagacttttataattcataagaatttacctagtagcgaaaactatatgtctgtagaaaaaatagctgatgatagaatagtggtatataatccatcaacaatgtctactccaatgactgaatacattatcaaaaagaacgatatagtcagagtgtttaacgaatacggatttgttcttgtagataacgttgatttcgctacaattatagaacgaagtaaaaagtttattaatggcgcatctacaatggaagatagaccgtctacaaaaaactttttcgaactaaatagaggagccattaaatgtgaaggtttagatgtcgaagacttacttagttactatgttgtttatgtcttttctaagcggtaaataataatatggtatgggttctgatatccccgttctaaatgcattaaataattccaatagagcgatttttgttcctataggaccttccaactgtggatactctgtattgttaatagatatattaatacttttgtcgggtaacagaggttctacgtcttctaaaaataaaagttttataacatctggcctgttcataaataaaaacttggcgattctatatatactcttattatcaaatctagccattgtcttatagatgtgagctactgtaggtgtaccatttgattttctttctaatactatatatttctctcgaagaagttcttgcacatcatctgggaataaaatactactgttgagtaaatcagttattttttttatatcgatattgatggacatttttatagttaaggataataagtatcccaaagtcgataacgacgataacgaagtatttatacttttaggaaatcacaatgactttatcagattaaaattaacaaaattaaaggagcatgtatttttttctgaatatattgtgactccagatacatatggatctttatgcgtcgaattaaatgggtctagttttcagcacggtggtagatatatagaggtggaggaatttatagatgctggaagacaagttagatggtgttctacatccaatcatatatctaaagatatacccgaagatatgcacactgataaatttgtcatttatgatatatacacttttgacgctttcaagaataaacgattggtattcgtacaggtacctccgtcgttaggagatgatagtcatttgactaatccgttattgtcaccgtattatcgtaattcagtagccagacaactggtcaataatatgatttttaatcaagattcatttttaaaatatttattagaacatctgattagaagccactatagagtttctaaacatataacaatagttagatacaaggataccgaagaattaaatctaacgagaatatgttataatagagataagtttaaggcgtttgtattcgcttggtttaacggcgtttcggaaaatgaaaaggtactagatacgtataaaaaggtatctaatttgatataatgaattcagtgactgtatcacacgcgccatatactattacttatcacgatgattgggaaccagtaatgagtcaattggtagagttttataacgaagtagctagttggctgctacgagacgagacgtcgcctattcctgataagttctttatacagttgaaacaaccgcttagaaataaacgagtatgtgtgtgcggtatagatccgtatccgaaagatggaactggtgtaccgttcgaatcaccaaattttacaaaaaaatcaattaaggagatagcttcatctatatctagattaaccggagtaattgattataaaggttataaccttaatataatagacggggttataccctggaattattacttaagttgtaaattaggagaaacaaaaagtcacgcgatctactgggataaaatttctaagttactgctgcagcatataactaaacacgttagtgttctttattgtttgggtaaaacagatttctcgaatatacgggccaagttagaatccccggtaactaccatagtcggatatcatccagcggctagagaccgccaattcgagaaagatagatcatttgaaattatcaacgttttactggaattagacaacaaggcacctataaattgggctcaagggtttatttattaatgctttagtgaaattttaacttgtgttctaaatggatgcggctattagaggtaatgatgttatctttgttcttaagactataggtgtcccgtcagcgtgcagacaaaatgaagatccaagatttgtagaagcatttaaatgcgacgagttagaaagatatattgagaataatccagaatgtacactattcgaaagtcttagggatgaggaagcatactctatagtcagaattttcatggatgtagatttagacgcgtgtctagacgaaatagattatttaacggccattcaagattttattatcgaggtgtcaaactgtgtagctagattcgcgtttacagaatgcggcgccattcatgaaaatgtaataaaatccatgagatctaatttttcattgactaagtctacaaatagagataaaacaagttttcatattatctttttagatacgtataccactatggatacattgatagctatgaaacgaacactattagaattaagtagatcatctgaaaatccactaaccagatcgatagacactgccgtatataggagaaaaacaactcttcgggttgtaggtactaggaaaaatccaaattgcgacactattcatgtaatgcaaccaccgcatgataatatagaagattacctattcacttacgtggatatgaacaacaatagttattacttttctctacaacaacgattggaggatttagttcctgataagttatgggaaccagggtttatttcattcgaagacgctataaaaagagtttcaaaaatattcattaattctataataaactttaatgatctcgatgaaaataattttacaacggtaccactggtcatagattacgtaacaccttgtgcattatgtaaaaaacgatcgcataaacatccgcatcaactatcgttggaaaatggtgctattagaatttacaaaactggtaatccacatagttgtaaagttaaaattgttccgttggatggtaataaactgtttaatattgcacaaagaattttagacactaactctgttttattaaccgaacgaggagaccatatagtttggattaataattcatggaaatttaacagcgaagaacccttgataacaaaactaattttgtcaataagacatcaactacctaaggaatattcaagcgaattactctgtccgaggaaacgaaagactgtagaagctaacatacgagacatgttagtagattcagtagagaccgatacctatccggataaacttccgtttaaaaatggtgtattggacctggtagacggaatgttttactctggagatgatgctaaaaaatatacgtgtactgtatcaaccggatttaaatttgacgatacaaagttcgtcgaagacagtccagaaatggaagagttaatgaatatcattaacgatatccaaccattaacggatgaaaataagaaaaatagagagctatatgaaaaaacattatctagttgtttatgcggtgctaccaaaggatgtttaacattcttttttggagaaactgcaactggaaagtcgacaaccaaacgtttgttaaagtctgctatcggtgacctgtttgttgagacgggtcaaacaattttaacagatgtattggataaaggacctaatccatttatcgctaacatgcatttgaaaagatctgtattctgtagcgaactacctgattttgcatgtagtgggtcaaagaaaatcagatctgataatattaaaaagttgacagaaccttgtgtcattggaagaccgtgtttctccaataaaattaataatagaaaccatgcgacaatcattatcgatactaattacaaacctgtttttgataggatagataacgcattaatgagaagaattgccgtcgtgcgattcagaacacacttttctcaaccttctggtagagaggctgctgaaaataatgacgcgtacgataaagtcaaactattagacgaggggttagatggtaaaatacaaaataatagatatagatttgcatttctatacttgttggtgaaatggtacagaaaatatcatgttcctattatgaaactatatcctacaccggaagagattcctgactttgcattctatctcaaaataggtactctgttagtatctagctctgtaaagcatattccattaatgacggacctctccaaaaagggatatatattgtacgataatgtggtcactcttccgttgactactttccaacagaaaatatccaagtattttaattctagactatttggacacgatatagagagcttcatcaatagacataagaaatttgccaatgttagtgatgaatatctgcaatatatattcatagaggatatttcatctccgtaaatatatgctcatatatttatagaagatatcacatatctaaatgaataccggaatcatagatttatttgataatcatgttgatagtataccaactatattacctcatcagttagctactctagattatctagttagaactatcatagatgagaacagaagcgtgttattgttccatattatgggatcaggtaaaacaataatcgctttgttgttcgccttggtagcttccagatttaaaaaggtttacattctagtgccgaacatcaacatcttaaaaattttcaattataatatgggtgtagctatgaacttgtttaatgacaaattcatagctgagaatatctttattcattccacaacaagtttttattctcttaattataacgataacgtcattaattataacggattatctcgctacaataactctatttttatcgttgatgaggcacataatatctttgggaataatactggagaacttatgaccgtgataaaaaataaaaacaagattccttttttactattgtctggatctcccattactaacacacctaatactctgggtcatattatagatttaatgtccgaagagacgatagattttggtgaaattattagtcgtggtaagaaagtaattcagacacttcttaacgaacgcggtgtgaatgtacttaaggatttgcttaaaggaagaatatcatattacgaaatgcctgataaagatctaccaacgataagatatcacggacgtaagtttctagatactagagtagtatattgtcacatgtctaaacttcaagagagagattatatgattactagacgacagctatgttatcatgaaatgtttgataaaaatatgtataacgtgtcaatggcagtattgggacaacttaatctgatgaataatttagatactttatttcaggaacaggataaggaattgtacccaaatctgaaaataaataatggcgtgttatacggagaagaattggtaacgttaaacattagttccaaatttaaatactttattaatcggatacagacactcaacggaaaacattttatatacttttctaattctacatatggcggattggtaattaaatatatcatgctcagtaatggatattctgaatataatggttctcagggaactaatccacatatgataaacggcaaaccaaaaacatttgctatcgttactagtaaaatgaaatcgtctttagaggatctattagatgtgtataattctcctgaaaacgatgatggtagtcaattgatgtttttgttttcgtcaaacattatgtccgaatcctatactctgaaagaggtaaggcatatttggtttatgactatcccagatactttttctcaatacaaccaaattcttggacgatctattagaaaattctcttacgccgatatttctgaaccagttaatgtatatcttttagccgccgtatattccgatttcaatgacgaagtgacgtcattaaacgattacacacaggatgaattaattaatgttttaccatttgacatcaaaaagctgttatatctaaaatttaagacgaaagaaacgaatagaatatactctattcttcaagagatgtctgaaacgtattctcttccaccacatccatcaattgtaaaagttttattgggagaattggtcagacaatttttttataataattctcgtattaagtataacgataccaagttacttaaaatggttacatcagttataaaaaataaagaagacgctaggaattacatagatgatattgtaaacggtcacttctttgtatcgaataaagtatttgataaatctcttttatacaaatacgaaaacgatattattacagtaccgtttagactttcctacgaaccatttgtttggggagttaactttcgtaaagaatataacgtggtatcttctccataaaactgatgagatatataaagaaataaatgtcgagctttgttaccaatggatacctttccgttacattggaacctcatgagctgacgttagacataaaaactaatattaggaatgccgtatataagacgtatctccatagagaaattagtggtaaaatggccaagaaaatagaaattcgtgaagacgtggaattacctctcggcgaaatagttaataattctgtagttataaacgttccgtgtgtaataacctacgcgtattatcacgttggggatatagtcagaggaacattaaacatcgaagatgaatcaaatgtaactattcaatgtggagatttaatctgtaaactaagtagagattcgggtactgtatcatttagcgattcaaagtactgcttttttcgaaatggtaatgcgtatgacaatggcagcgaagtcactgccgttctaatggaggctcaacaaggtatcgaatctagttttgtttttctcgcgaatatcgtcgactcataagaaagagaatagcggtaagtataaacacgaatactatggcaataattgcgaatgttttattctcttcgatatatttttgataatatgaaaaacatgtctctctcaaatcggacaaccatctcataaaatagttctcgcgcgctggagaggtagttgccgctcgtataatctccccagaataatatacttgcgtgtcgtcgttcaatttatacggatttctatagttctctgttatataatgcggttttccatcatgattagacgacgacaatagtgttctaaatttagatagttgatcagaatgaatgtttattggcgttggaaaaattatccatacagcgtctgcagagtggttgatagttgttcctagatatgtaaaataatccaacttactaggcagcaaattgtctagataaaatactgaatcaaacggtgcagacgtattggcggatctaatggaatccaattgattaactatcttttgaaaatatacatttttatgatccaatacttgtaagaatatagaaataatgataagtccatcatcgtgtttttttgcctcttcataagaactatattttttcttattccaatgaacaagattaatctctccagagtatttgtacacatctatcaagtgattggatccataatcgtcttcctttccccaatatatatgtagtgatgataacacatattcattggggagaaaccctccacttatatatcctcctttaaaattaatccttactagttttccagtgttctggatagtggttggtttcgactcattataatgtatgtctaacggcttcaatcgcgcgttagaaattgcttttttagtttctatattaataggagatagttgttgcggcatagtaaaaatgaaatgataactgtttaaaaatagctcttagtatgggaattacaatggatgaggaagtgatatttgaaactcctagagaattaatatctattaaacgaataaaagatattccaagatcaaaagacacgcatgtgtttgctgcgtgtataacaagtgacggatatccgttaataggagctagaagaacttcattcgcgttccaggcgatattatctcaacaaaattcagattctatctttagagtatccactaaactattacggtttatgtactacaatgaactaagagaaatctttagacggttgagaaaaggttctatcaacaatatcgatcctcactttgaagagttaatattattgggtggtaaactagataaaaaggaatctattaaagattgtttaagaagagaattaaaagaggaaagtgatgaacgtataacagtaaaagaatttggaaatgtaattctaaaacttacaacacgggataaattatttaataaagtatatataagttattgcatggcgtgttttattaatcaatcgttggaggatttatcgcatactagtatttacaatgtagaaattagaaagattaaatcattaaatgattgtattaacgacgataaatacgaatatctgtcttatatttataatatgctagttaatagtaaatgaacttttacagatctagtataattagtcagattattaagtataatagacgactagctaagtctattatttgcgaggatgactctcaaattattacactcacggcattcgttaaccaatgcctatggtgtcataaacgagtatccgtgtccgctattttattaactactgataacaaaatattagtatgtaacagacgagatagttttctctattctgaaataattagaactagaaacatgtttagaaagaaacgattatttctgaattattccaattatttgaacaaacaggaaagaagtatactatcgtcatttttttctctagatccagctactactgataatgatagaatagacgctatttatccgggtggcatacccaaaaggggtgagaatgttccagagtgtttatccagggaaattaaagaagaagttaatatagacaattcttttgtattcatagacactcggttttttattcatggcatcatagaagataccattattaataaattttttgaggtaatcttctttgtcggaagaatatctctaacgagtgatcaaatcattgatacatttaaaagtaatcatgaaatcaaggatctaatatttttagatccgaattcaggtaatggactccaatacgaaattgcaaaatatgctctagatactgcaaaacttaaatgttacggccatagaggatgttattacgaatcattaaaaaaattaactgaggatgattgattagaaaatataaattaatttaccatcgtgtatttttataacgggattgtccggcatatcatgtagatagttaccgtctacatcgtatactcgaccatctacgcctttaaatcctctatttattgacattaatctattagaattggaataccaaatattagtaccctcaattagtttattggtaatattttttttagacgatagatcgatggctcttgaaaccaaggttttccaaccggactcattgtcgatcggtgagaagtctttttcattagcatgaatccattctaatgatgtatgtttaaacactctaaacaattggacaaattcttttgatttgctttgaatgatttcaaataggtcttcgtctacagtaggcataccattagataatctagccattataaagtgcacgtttacatatctacgttctggaggagtaagaacgtgactattgagacgaatggctcttcctactatctgacgaagagacgcctcgttccatgtcatatctaaaatgaagatatcattaattgagaaaaaactaataccctcgcctccactagaagagaatacgcatgttttaatgcattctccgttagtgtttgattcttggttaaactcagccaccgccttgattctagtatcttttgttctagatgagaactctatattagagataccaaagactttgaaatatagtaataagatttctattcctgactgattaacaaatggttcaaagactagacatttaccatgggatgctaatattcccaaacatacatctataaatttgacgcttttctcttttaattcagtaaatagagagatatcagccgcactagcatcccctttcaatagttctccctttttaaaggtatctaatgcggatttagaaaactctctatctcttaatgaatttttaaaatcattatatagtgttgctatctcttgcgcgtattcgcccggatcacgattttgtctttcaggaaagctatcgaacgtaaacgtagtagccatacgtctcagaattctaaatgatgatatacctgtttttatttcagcgagtttagccttttgataaatttcttcttgctttttcgacatattaacgtatcgcattaatactgttttcttagcgaatgatgcagacccttctacgtcatcaaaaatagaaaactcgttattaactatatacgaacatagtcctcctagtttggagactaattctttttcatcgactagacgtttattctcaaatagtgattggtgttgtaaggatcctggtcgtagtaagttaaccaacatggtgaattcttgcacactattgacgataggtgtagccgataaacaaatcatcttatggttttttaacgcaatggtcttagataaaaaattatatactgaacgagtaggacggatcttaccatcttctttgattaatgatttagaaatgaagttatgacattcatcaatgatgacgcatattctactcttggaattaatagttttgatattagtaaaaaatttatttctaaaattttgatcatcgtaattaataaaaatacaatccttcgttatctctggagcgtatctgagtatagtgttcatccaaggatcttctatcaaagcctttttcaccaataagataatagcccaattcgtataaatatccttaagatgtttgagaatatatacagtagtcattgttttaccgacacccgtttcatggaacaataaaagagaatgcatactgtctaatcctaagaaaactcttgctacaaaatgttgataatccttgaggcgtactacgtccgaccccatcatttcaacgggcatattagtagttctgcgtaaggcataatcgatataggccgcgtgtgatttactcatttatgagtgataagtaataactatgttttaaaaatcacagcagtagtttaactagtcttctctgatgtttgttttcgatactttttgaatcagaagtcatactagaataaagcaacgagtgaacgtaatagagagcttcgtatactctattcgaaaactctaagaacttattaatgaattccgtatccactggattgtttaaaatactaaattgaacactgttcacatccttccaagaagaagacttagtgacggacttaacatgagacataaataaatccaaattttttttacaaacatcactagccaccataatggcgctatctttcaaccagctatcgcttacgcattttagcagtctaacatttttaaagagactacaatatattctcatagtatcgattacacctctaccgaataaagttggaagtttaataatacaatatttttcgtttacaaaatcaaataatggtcgaaacacgtcgaaggttaacatcttataatcgctaatgtatagattgttttcagtgagatgattattagatttaatagcatctcgttcacgtttgaacagtttattgcgtgcgctgaggtcggcaactacggcgtccgctttagtactcctcccataatactttacgctattaatctttaaaatttcatagactttatctagatcgctttctggtaacatgatatcatgtgtaaaaagttttaacatgtcggtcggcattctatttagatcattaactctagaaatctgaagaaagtaattagctccgtattccagactaggtaatgggcttttacctagagacagattaagttctggcaatgtttcataaaatggaagaaggacatgcgttccctcccggatattttttacaatttcatccatttacaactctatagtttgttttcattattattagttattatctcccataatcttggtaatacttaccccttgatcgtaagataccttatacaggtcattacatacaactaccaattgtttttgtacataatagattggatggttgacatccatggtggaataaactactcgaacagatagtttatctttccccctagatacattagccgtaatagttgtcggcctaaagaatatctttggtgtaaagttaaaagttagggttcttgttccattattgctttttgtcagtagttcattataaattctcgagatgggtccgttctctgaatatagaacatcatttccaaatctaacttctagtctagaaataatatcggtcttattcttaaaatctattcccttgatgaagggatcgttaatgaacaaatccttggcctttgattcggctgatctattatctccgttatagacgttacgttgactagtccaaagacttacaggaatagatgtatcgatgatgttgatactatgtgatatgtgagcaaagattgttctcttagtggcatcactatatgttccagtaatggcggaaaactttttagaaatgttatatataaaagaattttttcgtgttccaaacattagcagattagtatgaagataaacactcatattatcaggaacattatcaatttttacatacacatcagcatcttgaatagaaacgataccatcttctggaacctctacgatctcggcagactccggataaccagtcggtgggccatcgctaacaataactagatcatccaacaatctactcacatatgcatctatataatctttttcatcttgtgagtaccctggatacgaaataaatttattatccgtatttccataataaggtttagtataaacagagagagatgttgccgcatgaacttcagttacagtcgccgttggttggtttatttgacctattactctcctaggtttctctataaacgatggtttaatttgtacattcttaaccatatatccaataaagctcaattcaggaacataaacaaattctttgttgaacgtttcaaagtcgaacgaagagtcacgaataacgatatcggatactggattgaaggttaccgttacggtaatttttgaatcggatagtttaagactgctgaatgtatcttccacatcaaacggagttttaatataaacgtatactgtagatggttctttaatagtgtcattaggagttaggccaatagaaatatcattaagttcactagaatatccagagtgtttcaaagcaattgtattattgatacaattattatataattcttcgccctcaatttcccaaataacaccgttacacgaagagatagatacgtgattaatacatttatatccaacatatggtacgtaactgaatcttcccatacctttaacttctggaagttccaaactcagaaccaaatgattaagcgcagtaatatactgatccctaatttcgaagctagcgatagcctgattgtctggaccatcgtttgtcataactccggatagagaaatatattgcggcatatataaagttggaatttgactatcgactgcgaagacattagaccgtttaatagagtcatccccaccgatcaaagaattaatgatagtattattcattttctatttaaaatggaaaaagcttacaataaactccgtagagaaatatctataatttgtgagttttccttaaagtaacagcttccgtaaacgccgtctttatctcttagtaggtttattgtatttatgaccttttccttatcttcatagaatactaaaggcaacaaagaaatttttggttcttctctaagagctacgtgagacttaaccatagaagccaacgaatccctacatattttagaacagaaataccctacttcaccacccttgtatgtctcaatactaataggtctaaaaaccaaatcttgattacaaaaccaacacttatcaattacactatttgtcttaatagacacatctgccatagatttataatactttggtagtatacaagcgagtgcttcttctttagcgggcttaaagactgctttaggtgctgaaataaccacatctggaaggcttactcgcttagccatttaattacggaactatttttttatacttctaatgagcaagtagaaaacctctcatctacaaaaacgtactcgtgtccataatcctctaccatagttacacgttttttagatctcatatgtgctaaaaagttttcccatactaattggttactattatttttcgtataatttttaacagtttgaggttttagatttttagttacagaagtgatatcgaatattttatccaaaaagaatgaataattaattgtcttagaaggagtgttttcttggcaaaagaataccaagtgcttaaatatttctactacttcattaatcttttctgtactcagattcagtttctcatcttttacttgattgattatttcaaagactaacttataatcctttttatttattctctcgttagccttaagaaaactagatacaaaatttgcatctacatcatccgtggatatttgatttttttccatgatatccaagagttccgagataatttctccagaacattgatgagacaataatctccgcaatacatttctcaaatgaataagtttattagacacgtggaagtttgactttttttgtacctttgtacatttttgaaatacagactcgcaaaaaatacaatattcatatccttgttcagatactataccgttatgtctacaaccgctacataatcgtagattcatgttaacactctacgtatctcgtcgtccaatattttatataaaaacattttatttctagacgttgccagaaaatcctgtaatatttttagttttttgggctgtgaataaagtatcgccctaatatggttaccgtcctccgccaatatagtagttaaattatccgcacatgcagaagaacaccgcttaggcggattcagtacaatgttatatttttcgtaccaactcatttaaatatcataatctaaaatagttctgtaatatgtctagcgctaatatattgatcataatcctgtgcataaattaagatacaacaatgtctcgaaatcatcgacatggcttcttccatagttagaagatcgtcgtcaaagttagcaacgtgattcatcaacatttgctgttttgaggcagcaaatactgaaccgtcgccattcaaccattcataaaaaccatcgtctgaatccattgataatttcttgtactggtttttgagagctcgcatcaatctagcatttctagctcccggattgaaaacagaaagaggatcgtacatccagggtccattttctgtaaatagaatcgtataatgtcccttcaagaagatatcagacgatccacaatcaaagaattggtctccgagtttgtaacaaactgcggactttaacctatacatgataccgtttagcataatttctggtgatacgtcaatcggagtatcatctattagagatctaaagccggtgtaacattctccaccaaacatattcttattctgacgtcgttctacataaaacatcattgctccattaacgataacaggggaatgaacagcactacccatcacattagttcccaatggatcaatgtgtgtaactccagaacatcttccatagcctatgttaggaggagcgaacaccactcttccactattgccatcgaatgccatagaataaatatccttggaattgatagaaatcggactgtcggatgttgtgatcatcttcataggattaacaactatgtatggtgccgcctgaagtttcatatcgtaactgatgccgtttataggtctagccacagaaaccaacgtaggtctaaatccaactatagacaaaatagaagccaatatctgttcctcatctgtcataacttgagagcatccagtatgaataatcttcattagatggggatctaccgcatcatcatcgttacaataaaaaattcccattctaatgttcataattgcttttctaatcatggtatgcatgtttgctctctgaatctctgtggaaattagatctgatacacctgtaatcactatcggattatcctccgtaagacgattaaccaacaacatataattataagactttacttttctaaattcataaagttgctggattaggctataggtgtctccatgtacatacgcgttctcgagcgcaggaagtttaataccgaatagtgccatcagaataggatgaatatagtaattagtttctggttttctataaataaaagacaaatcttgtgaactagacatatcggtaaaatgcatggattggaatcgtgtagtcgacagaagaatatgatgattagatggagagtatattttatctaactctttgagttggtcaccgattctaggactagctcgagaatgaataagtactaaaggatgagtacatttcacagaaacactagcattgttcaatgtgctctttacatgggtaaggagttgaaatagctcgtttctatttgttctgacaatatttagtttattcataatgttaagcatatcctgaatagtaaagttagatgtgtcatacttgttagtagttagatatttagcaattgcattcccatcatttctcaatctcgtactccaatcatgtgtagatgctacttcgtcgatggaaaccatacaatcctttttgataggctgttgagattgatcatttcctgcacgtttaggtttggtacgttgatttctagcccctgcggatataaagtcatcgtctacaatttgggacaatgaattgcatacactacaagacaaagatttatcagaagtgtgaatatgatcttcatctaccaaagaaagagtttgattagtataactagattttagtcctgcgttagatgttaaaaaaacatcgctattgaccacggcttccattatttatattcgtagtttttactcgaaagcgtgattttaatatccaatcttattacttttggaatcgttcaaaacctttgactagttgtagaatttgatctattgccctacgcgtatactcccttgcatcatatacgttcgtcaccagatcgtttgtttcggcctgaagttggtgcatatctctttcaacattcgacatgagatccttaagggccatatcgtctagattttgttgagatgctgctcctggatttggattttgttgtgctgttgtacatactgtaccaccagtaggtgtaggagtacatacagtggccacaataggaggttgagaaagtgtaaccgttggagtagtacaagaaatacttccatccgattgttgtgtacatgtagttgttggtaacgtctgagaaggttgggtagatggcggcgtcgtcgttttttgatctttattaaatttagagataatatcctgaacagcattgctcggcgtcaacgctggaaggagtgaactcgccggcgcatcagtatcttcagacagccaatcaaaaagattagacatatcagatgatgtattagtttgttgtcgtggttttggtgtaggagcagtactactaggtagaagaataggagccgatgtagctgttggaaccggctgtggagttatatgaatagttggttgtagcggttggataggctgtctgctggcggccatcatattatctctagctagttgttctcgcaactgtctttgataatacgactcttgagactttagtcctatttcaatcgcttcatcctttttcgtatccggatccttttcttcagaataatagattgacgactttggtgtagaggattctgccagcctctgtgagaacttgttaaagaagtccatttaaggctttaaaattgaattgcgattataagattaaatggcagacacagacgatattatcgactatgaatccgatgatctcaccgaatacgaggatgatgaagaagaggaagaagatggagagtcactagaaactagtgatatagatcccaaatcttcttataagattgtagaatcagcatccactcatatagaagatgcgcattccaatcttaaacatatagggaatcatatatctgctcttaaacgacgctatactagacgtataagtctatttgaaatagcgggtataatagcagaaagctataacttgcttcaacgaggaagattacctctagtttcagaattttctgacgaaacgatgaagcaaaatatgctacatgtaattatacaagagatagaggagggttcttgtcctatagtcatcgaaaagaacggagaattgttgtcggtaaacgattttgacaaagatggtctaaaattccatctagactatattatcaaaatttggaaacttcaaaaacgatattagaatttatacgaatatcgttctctaaatgtcacaatcaagtctcgcatgttcagcaatttattgtcgtactttatatcgtgttcattaacgatatcttgcaaaatagtaatgattctatcttccttcgatagatattcttcagagattattgtcttatattctttcttgttatcagatatgaatttgataagactttgaacattattgatacccgtctgtttaattttttctacagatattttagttttggcagattctatcgtatctgtcaatagacatccaacatcgacattcgacgtcaattgtctataaatcaacgtataaattttagaaataacattagcgaattgttgtgcgttgatgtcgttattctgaaacagtatgattttaggtagcattttcttaacaaagagaacgtatttattgttactcagttgaacagatgatatatccagattactaacgcatctgattccgtataccaaactttcagaagaaatggtatacaattgtttgtattcattcaatgtctctttttcagaaattagtttagagtcgaatactgcaataattttcaagagatagttttcatcagataagattttatttagtgtagatatgataaaactattgttttgttggagaacttgatacgccgcgttctctgtagtcgacgctctcaaatgggaaacaatctccattatttttttggaatcggatactatatcttcggtatcttgacgcagtctagtatacatagagttaagagagattagagtttgtacattaagcaacatgtctctaaatgtggctacaaacttttcctttttcacatcatctagtttattatataccgatttcacaacggcaccagatttaaggaaccagaatgaaaaactctgataactacaatatttcatcatagttacgattttatcatcttctatagttggtgtaatagcgcatacctttttctccaagactggaaccaacgtcataaaaatgtttaaatcaaaatccatatcaacatctgatgcgctaagaccagtctcgcgttcaagattatctttactaatggtgacgaactcatcgtataaaactctaagtttgtccattatttatttacagatttagttgtttaatttatttgtgctcttccagagttgggatagtatttttctaacgtcggtattatattattaggatctacgttcatatgtatcataatattaatcatccacgttttgataaatctatctttagcttctgaaataacgtatttaaacaaaggagaaaaatatttagctacggcatcagacgcaataacattttttgtaaatgtaacgtatttagacgacagatcttcgttaaaaagttttccatctatgtagaatccatcggttgttaacaccattcccgcgtcagattgaataggagtttgaatagtttgttttggaaatagatccttcaataacttatagttgggtgggaaaaaatcgattttatcactagactctttcttttttactatcattacctcatgaactatttcttgaatgagtatatgtattttctttcctatatcggacgcgttcattggaaaatataccatgtcgttaactataagaatatttttatcctcgtttacaaactgaataatatcagatgtagttcgtaaacgaactatatcatcaccagcacaacatctaactatatgatatccactagtttcctttagccgtttattatcttgttccatattagcagtcattccatcatttaagaaggcgtcaaagataatagggagaaatgacattttggattctgttacgactttaccaaaattaaggatatacggacttactatctttttctcaacgtcaatttgatgaacacacgatgaaaatgtgcttctatgagattgatcatgtagaaaacaacaagggatacaatatttccgcatatcatgaaatatattaagaaatcccaccttattatatttccccaaaggatccatgcacgtaaacattatgccgttatcattaataaagacttctttctcatcggatctgtaaaagttgttactgatttttttcattccaggatctagataattaataatgatgggttttctattcttattctttgtattttggcatatcctagaccagtaaacagtttccactttggtaaaatcagcagacttttgaacgctattaaacatggcattaatggcaataactaaaaatgtaaaatatttttctatgttaggaatatggtttttcactttaatagatatatggtttttggccaaaatgatagatatttttttatccgaggatagtaaaatattattagtcgccgtctctataaaaatgaagctagtctcgatatccaattttattctagaattgataggagtcgccaaatgtaccttatacgttatatctcccttgatgcgttccatttgtgtatctatatcggacacaagatctgtaaatagttttacgttattaatcatcacggtatcgccgtcgctagataacgctaatgtaccatccaagtcccaaatggagagatttaactgttcatcgtttagaataaaatgattaccggtcatattaataaagtgttcatcgtatctagataacaacgacttataattaatgtccaagtcttgaactcgctgaatgatcttttttaacccagttagttttagattggtacgaaatatattgttaaactttgattctacagtaatgtccaaatctagttgtggaaatacttccatcaacattgtttcaaacttgataatattattatctacatcttcgtacgatccaaattccggaatagatgtatcgcacgctctggccacccagataaccaaaaagtcacacgctccaggatatacattgtataaaaagctatcgtttttaagtagggtttttttctgcgtgtatacgaagggattaaaaatagtattatcaacgtaactatattccaaattattcttatgagaatagataataatatcgtccttaatatctaacaaatttcctaaatatccctttaattgagtcattcgaagcgtcaatagaatatgtctcttaactatttccggctgttgtatatttaaatgacttcgtaaaaaataatatatgggcgacttctcatctatgtaatcatatggagtgagatatagggctcgttctacctcctgccccttacccacctgtaataccaattgcggacttactatatatcgcatatttatatcgtggggtaaagtgaaaatctactaccgatgatgtaagtcttacaatgttcgaaccagtaccagatcttaatttggaggcctccgtagaactaggggaggtaaatatagatcaaacaacacctatgataaaggagaatagcggttttatatcccgcagtagacgtctattcgcccatagatctaaggatgatgagagaaaactagcactacgattctttttacaaagactttattttttagatcatagagagattcattatttgttcagatgcgttgacgctgtaaaagacgtcactattaccaaaaaaaataacattatcgtggcgccttatatagcacttttaactatcgcatcaaaaggatgcaaacttacagaaacaatgattgaagcattctttccagaactatataatgaacatagtaagaaatttaaattcaactctcaagtatccatcatccaagaaaaactcggataccagtttggaaactatcacgtttatgattttgaaccgtattactctacagtagctctggctattcgagatgaacattcatctggcatttttaatatccgtcaagagagttatctggtaagttcattatctgaaataacatatagattttatctaattaatctaaaatctgatcttgttcaatggagtgctagtacgggcgctgtaattaatcaaatggtaaatactgtattgattacagtgtatgaaaagttacaactggtcatagaaaatgattcacaatttacatgttcattggctgtggaatcaaaacttccaataaaattacttaaagatagaaatgaattatttacaaaattcattaacgagttaaaaaagaccagttcattcaagataagcaaacgcgataaggatacgctactaaaatattttacttaggactggagttagaatttatagacgactcatttcgtttatcattgttactattattactattactatcattattagtgttggcattattagtattcttcttgtcatcttgttcagaaatatacagcaatgctatacctaatactaaatacattatcatgctcgcaatggctctaacaacaacgaaccaaaatgaatttggtcgtagcttttgttcacaaaaatacataaagaaatgtctacataaatctatggcgccattggctacttgaaatagcgccagtcctcctacagattttaatatagctgtataacatgacatttattcatcatcaaaagagacagagtcaccatctgtcatatttagattttttttcatgtgttcaaagtatcctctactcatttcattataatagtttatcatacttagaattttaggacggatcaatgagtaagacttgactagatcgtcagtagtaatttgtgcatcgtctattctgcatccgcttcgtcgaataatgtatagcatcgctttgagattctccatagctatcaagtctttatacaatgacatggaaatatctgtgaatactttatacttctccaacatcgatgccttaacatcatcgcctactttagcattgaaaatacgttctattgtgtagatggatgtagcaagatttttaaacaacaatgccatcttacacgatgattgcctcaagtctccaatcgtttgtttagaacgattagctacagagtccaatgcttggctgactagcatattattatctttagaaattgtattcttcaatgaggcgtttatcatatctgtgatttcgttagtcatattacagtctgactgggttgtaatgttatccaacatatcacctatggatacggtacacgtaccagcatttgtaataatcctatctaagatgttgtatggcattgcgcagaaaatatcttctcctgtaatatctccactctcgataaatctactcagattattcttaaatgccttattctctggagaaaagatatcagtgtccatcatttcattaatagtatacgcagaaaagataccacgagtatcaattctatccaagatacttatcggttccgagtcacagataatggtttcctctccttcgggagatcctgcatagaaatatctaggacaatagtttctatactgtctgtaactctgataatctctaaagtcactaactgataccatgaaattgagaagatcaaacgctgaagtaattaatttttctgcctcgtttttactacaactagttttcatcaatgtagtgacgatgtattgtttagttacttttggtctaatactgatgatagagatattattgcttcccataatggatcttctagtagtcaccttaaagcccattgatgcgaatagcagatagataaagtcttggtatgactcctttctaatatagtacggactacctttgtcacccaactttatacccacataagccataacaacctctttaatagccgtttcatgaggtttatcagccatgagcctgagtagttggaagaatctcatgaatcccgtctcagaaagtcctatatgcatgatagatttatctttcctgggaaactctcgtatagtcatagatgaaatactctttaaagtttctgaaataagattagtaacagtcttacctccgactactctaggtaacaaacaaactctaataggtgttttctctgcggagataatatcagaaaggatagagcaataagtagtattattgtgattataaagaccgaatacataacaggtagaatttataaacatcatgtcctgaaggtttttagacttgtattcctcgtaatccataccgtcccaaaacatggatttggtaactttgatagccgtagatctttgttccttcgccaacaggttaaagaaattaataaagaatttgttgtttctatttatgtccacaaattgcacgtttggaagcgccacggttacattcactgcagcattttgaggatcgcgagtatgaagtacgatgttattgtttactggtatatctggaaagaaatctaccagtctaggaataagagattgatatcgcatagaaatagtaaagtttataatctcatcatcgaagagcattttgttaccattgtaataaatatccactctgtcatatgtataaatgaagtactgttcaaacatgatgagatgtttatatgttggcatagtagtgagatcgacgtttggtaatggcaatgtattaagattaactccataatgtctagcagcatctgcgatgttataagcgtcgtcaaagcggggtcgatcttgtattgttatatattgtctaacacctataagattatcaaaatcttgtctgcttaatacaccgttaacaatttttgccttgaattcttttattggtgcattaataacatccttatagaggatgttaaacaaataagtgttatcaaagttaagatctggatatttcttttctgctagaacatccattgagtcggagccatctggtttaatataaccaccgataaatctagctctgtattctgtatccgtcaatctaatattaagaaggtgttgagtgaaaggtggaagatcgtaaaagctgtgagtattaatgataggattagtttccgaactaatgttaattggggtattaataatatctatatttccagcgttaagtgtaacattaaacagttttaattcacgtgacgtggtatcaattaaataattaatgcccaatttggatatagcagcctgaagctcatcttgtttagttacggatcctaatgagttattaagcaatatatcgaacggatgaacgaaggttgttttaagttggtcacatactttgtaatctagacatagatgcggaagaacggtagaaactatacgaaataaatattcagagtcctctaattgatcaagagtaactattgacttaataggcatcatttatttagtattaaatgacgaccgtaccagtgacggatatacaaaacgatttaattacagagttttcagaagataattatccatctaacaaaaattatgaaataactcttcgtcaaatgtctattctaactcacgttaacaacgtggtagatagagaacataatgccgccgtagtgtcatctccagaggaaatatcctcacaacttaatgaagatctatttccagatgatgattcaccggccactattatcgaacgagtacaacctcatactactattattgacgatactccacctcctacgtttcgtagagagttattaatatcggaacaacgtcaacaacgagaaaaaagatttaatattacagtatcgaaaaatgctgaagcaataatggaatctagatctatgataacttctatgccaacacaaacaccatccttgggagtagtttatgataaagataaaagaattcagatgttagaggatgaagtggttaatcttagaaatcaacgatctaatacaaaatcatctgataatttagataattttaccaaaatactatttggtaagactccgtacaaatcaacagaagttaataagcgtatagccatcgttaattatgcaaatttgaacgggtcccccttatcagtcgaggacttggatgtttgttcggaggatgaaatagatagaatctataaaacgattaaacaatatcacgaaagtagaaaacgaaaaattatcgtcactaacgtgattattattgtcataaacattatcgagcaggcattgctaaaactcggatttgaagaaatcaaaggactgagtaccgatatcacttcagaaattatcgatgtggagatcggagatgactgcgatgctgtagcatctaaactaggaatcggtaacagtccggttcttaatattgtattgtttatactcaagatattcgttaaacgaattaaaattatttaatttaatacattcccatatccagacaacaatcgtctggattaatctgttcctgtcgtctcataccggacgacatattaatctttttattagtgggcatctttttagatggtttctttttcccagcattaactgagtcgatacctagaagatcgtgattgatctctccgaccattccacgaacttctaattggccgtctctgacggtaccataaactattttaccagcattagtaacagcttggacaatctgaccatccatcgcattgtacgatgtagtagtaactgttgttctacgtctaggagcaccagaagtatttttggagcccttggatgttgatgtagaagaagacgaggattttgattttggtttacatgtaatacattttgaactctttgattttgtatcacatgcgccggcagtcacatctgtttgagaattaagattattgttgcctcctttgacggctgcatctccaccgatttgcgctagtagatttttaagctgtggtgtaatcttattaactgtttcgatataatcatcgtaactgcttctaacggctaaattttttttatccgccatttagaagctaaaaatatttttatttatgcagaagatttaactagattatacaatgaactaatatgatccttttccagattatttacaaacttggtattttttggttctggaggaggcgaatttaaattcggacttggattcggattttgtaagttcttgatcttattatacatcgagtataggatggcgacagtaactgctacacaaataccgatcaaaagaagaataccaatcatttattgacaataacttcactattgatcaagtatgcaatatatcatcttttcactaaataagtagtaataatgattcaacaatgtcgagatatatggacgataataatttagttcatggaaatatcgctatgattggtgtgaatgactccgctaactctgtggggtgcgcagtgctttccccacatagaataaattagcattccgactgtgataataataccaagtataaacgccataatactcaatactttccatgtacgagtgggactggtagacttactaaagtcaataaaggcgaagatacacgaaagaatcaaaagaatgattccagcgattagcacgccggaaaaataatttccaatcataagcatcatgtccatttaactaataaaaattttaaatcgccgaatgaacaaagtggaatataaaccatataaaaacaatagtttgtactgcaaaaataatatctatttttgttttcgaagatatggtaaaattaaatagtagtacacagcatgttataactaacagcagcaacggctcgtaattacttatcatttactagacgaaaaggtggtgggatattttcttgctcaaataatacgaatatatcacccatccattttatgcgatgtttatatactctaatctttaatagatctatagacgacgggtttaccaacaatatagattttatcgattcatctaatttaaacccttccttaaacgtgaatgatctattatctggcataacgatgaccctacctgatgaatcggacaatgtactgggccatgtagaataaattatcaacgaattatcgtctacgaacatttatatcatttgttttaattttaggacgcgaataaatggatataaaatagaaaataacagatattacaaccagtgttatggccgcgcccaaccaggtaggcagttttattttatcttttactacaggttctcctggatgtacgtcaccaacggcggacgtagttctagtacaattagacgtaagttccgcttgggaattttttaacgctaaagagttaacgttaatcgtgcacccaacgtatttacatctagttcgttgaacatcttgattataatataaccattttctatctctagattcgtcagtgcactcatgtaaccaacataccctaggtcctaaatatttatctccggaattagattttggataattcgcgcaccaacaatttctatttcctttatgatcgttacaaaagacgtataatgccgtatccccaaaagtaaaataatcaggacgaataattctaataaactcagaacaatatctcgcatccatatgtttggagcaaatatcggaataagtagacatagccggtttccgttttgcacgtaaccattctaaacaattggggtttccaggatcgtttctacaaaatccagtcatgaaatcgtcacaatgttctgtcttgtaattattattaaatatttttggacagtgtttggtatttgtcttagaacaacattttgccacgctatcactatcgcccaggagataatccttttttataaaatgacatcgttgcccggatgctatataatcagtagcgtgttttaaatccttaatatattcaggagttacctcgttctgataatagattaatgatccaggacgaaatttgaaagaactacatggttctccatgaattaatacatattgtttagcaaattcaggaactataaaactactacaatgatctatcgacataccatctatcaaacaaaacttgggtttaatttctcccggagatgtttcataatagtacgtataactttcttctgcaaacttaacagctctattatattcaggataattaaaacctaattccatatatttgtctcgtatatctgctattcctggtgctattttgattctattaagagtaacagctgcccccattcttaataatcgtcagtatttaaactgttaaatgttggtatatcaacatctaccttatttcccgcagtataaggtttgttgcaggtatactgttcaggaatggttacatttatacttcttctatagtcctgtctttcgatgttcatcacatatgcaaagaacagaataaacaaaataatgtaagaaataatattaaatatctgtgaattcgtaaatacattgattgccataataattacagcagctacaatacacacaatagacattcccacagtgttgccattacctccacgatacatttgagttactaagcaataggtaataactaagctagtaagaggcaatagaaaagatgagataaatatcatcaatatagagattagaggagggctatatagagccaagacgaacaaaatcaaaccgagtaacgttctaacatcattatttttgaagattcccaaataatcattcattcctccataatcgttttgcatcatacctccatctttaggcataaacgattgctgctgttcctctgtaaataaatctttatcaagcactccagcacccgcagagaagtcgtcaagcatattgtaatatcttaaataactcatttatatattaaaaaatgtcactattaaagatggagtataatctttatgccgaactaaaaaaaatgacttgtggtcaacccctaagtctttttaacgaagacggggatttcgtagaagttgaaccgggatcatcctttaagtttctgatacctaagggattttacgcctctccttccgtaaagacgagtctagtattcgagacattaacaacgaccgataataaaatcactagtatcaatccaacaaatgcgccaaagttatatcctcttcaacgcaaagtcgtatctgaagtagtttctaatatgaggaaaatgatcgaatcaaaacgtcctctatacattactcttcacttggcgtgtggatttggtaagactattaccacgtgttatcttatggctacacacggtagaaaaaccgtcatttgcgtacccaataaaatgttaatacatcaatggaagacacaggtagaggcagtcggattggaacataagatatccatagatggagtaagtagtctattaaaggaactaaagactcaaagtccggatgtattaatagtagtcagtagacatctgacaaacgatgccttttgtaaatatatcaataagcattatgatttgttcatcttggatgaatcacatacgtataatctgatgaacaatacagcagttacaagatttttagcgtattatcctccgatgatgtgttattttttaactgctacacctagaccatctaaccgaatttattgtaacagtattattaatattgccaagttatccaatctaaaaaaaactatctatgcagtagatagtttttttgagccatattccacagataatattagacatatggtaaaacgactagatggaccatctaataaatatcatatatataccgagaagttattatctgtagacgagcctagaaatcaacttattcttgataccctggtagaagaattcaagtcaggaactattaatcgcattttagttattactaaactacgtgaacatatggtattattctacaaacgattattagattttttcggaccagaggttgtatttataggagacgcccaaaatagacgtactccagatatggtcaaatcaatcaaggaactaaatagatttatattcgtatccaccttattttattccggtactggtttagatattcctagtttggattcgttgttcatttgctcggcagtaatcaacaatatgcaaatagagcaattactagggagggtatgtcgagaaacagaactattagataggacggtatatgtatttcctaacacatccatcaaagaaataaagtacatgataggaaatttcatgcaacgaattattagtctgtctgtagataaactaggatttaaacaaaaaagttatcggaaacatcaagaatccgatcccacttctgcatgtacaacatcatccagagaagaacgtgtattaaatagaatatttaactcgcaaaatcgttaagaagtttaagcgacgatccgcatgctgcgcaggccagtgtattacccctcatagtattaatataatccaatgatacttttgtgatgtcggaaatcttaaccaatttagactgacaggcagaacacgtcatgcaatcatcatcgtcatcgataactgtagtcttgggcttctttttgcgactcttcattccggaacgcacattggtgctatccatttaggtagtaaaaaataagtcagaatatgccctataacacgatcgtgcaaaacctggtatatcgtctctatctttatcacaatatagtgtatcgacatttttattattattgacctcgtttatcttggaacatggaatgggaacatttttgttatcaacggccatctttgccttaattccagatgttgtaaaattataactaaacagtctatcatcgacacaaatgaaattcttgtttagacgtttgtagtttacgtatgcggctcgttcgcgtctcattttttcagatattgcaggtactataatattaaaaataagaatgaaataacataggattaaaaataaagttatcatgacttctagcgctgatttaactaacttaaaagaattacttagtctgtacaaaagtttgagattttcagattctgcggctatagaaaagtataattctttggtagaatggggaacatctacttactggaaaataggcgtgcaaaaggtagctaatgtcgagacgtcaatatctgattattatgatgaggtaaaaaataaaccgtttaatattgatccgggctattacattttcttaccggtatattttgggagcgtctttatttattcgaagggtaaaaatatggtagaacttggatctggaaactcttttcaaataccagatgatatgcgaagtgcgtgtaacaaagtattagacagcgataacggaatagactttctgagatttgttttgttaaacaatagatggataatggaagatgctatatcaaaatatcagtctccagttaatatatttaaactagctagtgagtacggattaaacatacccaaatatttagaaattgaaatagaggaagacacattatttgacgacgagttatactctattatagaacgctctttcgatgataaatttccaaaaatatccatatcgtatattaagttgggagaacttagacggcaagttgtagactttttcaaattctcattcatgtatattgagtccatcaaggtagatcgtataggagataatatttttattcctagcgttataacaaaatcaggaaaaaagatattagtaaaagatgtagaccatttaatacgatccaaggttagagaacatacatttgtaaaagtaaaaaagaaaaacacattttccattttatacgactatgatggaaacggaacagaaactagaggagaagtaataaaacgaattatagacactataggacgagactattatgttaacggaaagtatttctctaaggttggtagtgcaggcttaaagcaattgactaataaattagatattaatgagtgcgcaactgtcgatgagttagttgatgagattaataaatccggaactgtaaaacgaaaaataaaaaaccaatcagcatttgatttaagcagagaatgtttgggatatccagaagcggattttataacgttagttaataacatgcggttcaaaatagaaaattgtaaggttgtaaatttcaatattgaaaatactaattgtttaaataacccgagtattgaaactatatatggaaactttaaccagttcgtctcaatctttaatgtcgtcaccgatgtcaaaaaaagattattcgagtgaaataatatgcgcctttgatataggtgcaaaaaatcctgccagaactgttttagaagtcaaggataactccgttagggtattggatatatcaaaattagactggagttctgattgggaaaggcgcatagctaaagatttgtcacaatatgaatacactacagttcttctagaacgtcagcctagaaggtcgccgtatgttaaatttatctattttattaaaggctttttatatcatacatcggctgccaaagttatttgcgtctcgcctgtcatgtctggtaattcatatagagatcgaaaaaagagatcggtcgaagcatttcttgattggatggacacattcggattgcgagactccgttccggatagacgcaaattagacgatgtagcggatagtttcaatttggctatgagatacgtattagataaatggaatactaattatacaccttataataggtgtaaatctagaaattacataaaaaaaatgtaataacgttagtaacgccattatggataatctatttacctttctacatgaaatagaagatagatatgccagaactatttttaactttcatctaataagttgcgatgaaataggagatatatatggtcttatgaaagaacgcatttcctcagaggatatgtttgataatatagtgtataataaagatatacatcctgccattaagaaactagtgtattgcgacatccaacttactaaacacattattaatcagaatacgtatccggtatttaacgattcttcacaagtgaaatgttgtcattatttcgacataaactcagataatagcaatattagctctcgtacagtagagatatttgagagggaaaagtcatctcttgtatcatatattaaaactaccaataagaagagaaaggtcaattacggcgaaataaagaaaactgttcatggaggcactaatgcaaattacttttccggtaaaaagtctgacgagtatctgagtactacagttagatccaacattaatcaaccttggatcaaaaccatctctaagaggatgagagttgatatcattaatcactctatagtaacgcgtggaaaaagctctatattacaaactatagaaattatttttactaatagaacatgtgtgaaaatattcaaggattctactatgcacattattctatccaaggacaaggatgaaaaggggtgtatacacatgattgacaaattattctatgtctattataatttatttctgttgttcgaagatatcatccaaaacgagtactttaaagaagtagctaatgttgtaaaccacgtactcacggctacggcattagatgagaaattattcctaattaagaaaatggctgaacacgatgtttatggagttagcaatttcaaaatagggatgtttaacctgacatttattaagtcgttggatcataccgttttcccctctctgttagatgaggatagcaaaataaagttttttaaggggaaaaagctcaatattgtagcattacgatctctggaggattgtataaattacgtgactaaatccgagaatatgatagaaatgatgaaggaaagatcgactattttaaatagcatagatatagaaacggaatcggtagatcgtctaaaagaattgcttctaaaatgaaaaaaaacactaattcagaaatggatcaacgactagggtataagtttttggtgcctgatcctaaagccggagttttttatagaccgttacatttccaatatgtatcgtattctaattttatattgcatcgattgcatgaaatcttgaccgtcaagcggccactcttatcgtttaagaataatacagaacgaattatgatagaaattagcaatgttaaagtgactcctccagattactcacctataatcgcgagtattaaaggtaagagttatgacgcattagccacgttcactgtaaatatctttaaagaggtaatgaccaaagagggtatatccatcactaaaataagtagttatgagggaaaagattctcatttgataaaaattccgctactaataggatacgggaataaaaatccacttgatacagccaagtatcttgttcctaatgtcataggtggagtctttatcaataaacaatctgtcgaaaaagtaggaattaatctagtagaaaagattacaacatggccaaaatttagggttgttaagccaaactcattcactttctcgttttcctccgtatcccctcctaatgtattaccgacaagatatcgccattacaagatatctctggatatatcacaattggaagcgttgaatatatcatcgacaaagacatttataacggtcaatattgttttgctgtctcaatatttatctagagtgagtctagaattcattagacgtagtttatcatacgatatgcctccagaagttgtctatctagtaaacgcgataatagatagtgctaaacgaattactgaatctattactgactttaatattgatacatacattaatgacctggtggaagctgaacacattaaacaaaaatctcagttaacgattaacgagttcaaatatgaaatgctgcataactttttacctcatatgaactatacacccgatcaactaaagggattttatatgatatctttactaagaaagtttctctactgtatcttccacacttctagatatccagatagagattcgatggtttgtcatcgcatcctaacgtacggcaaatattttgagacgttggcacatgatgaattagagaattacataggcaacatccgaaacgatatcatgaacaatcacaagaacagaggcacttacgcggtaaacattcatgtactaacaactcccggacttaatcacgcgttttctagcttattgagtggaaagttcaaaaagtcagacggtagttatcgaacacatcctcactattcatggatgcagaatatttctattcctaggagtgttggattttatccggatcaagtaaagatttcaaagatgttttctgtcagaaaataccatccaagtcaatatctttacttttgttcatcagacgttccggaaagaggtcctcaggtaggtttagtatctcaattgtctgtcttgagttccattacaaatatactaacgtctgagtatttggatttggaaaagaaaatttgtgagtatatcagatcatattataaagatgatataagttactttgaaacaggatttccaatcactatagaaaatgctctagtcgcatctcttaatccaaatatgatatgtgattttgtaactgactttagacgtagaaaacggatgggattcttcggtaacttggaggtaggtattactttagttagggatcacatgaatgaaattcgcattaatattggagcgggaagattagtcagaccattcttggttgtggataacggagagctcatgatggatgtgtgtccggagttagaaagcagattagacgacatgacattctctgacattcagaaagagtttccgcatgtcatcgaaatggtagatatagaacaatttacttttagtaacgtatgtgaatcggttcaaaaatttagaatgatgtcaaaggatgaaagaaagcaatacgatttatgtgactttcctgccgaatttagagatggatatgtagcatcttcactagtgggaatcaatcacaattctggacccagagctattcttggatgtgctcaagctaaacaagctatctcttgtctgagttcggatatacgaaataaaatagacaatggaattcatttgatgtatccagagaggccaatcgtgattagtaaggctttagaaacttcaaagattgcggctaattgcttcggccaacatgttactatagcattaatgtcgtacaaaggtatcaatcaagaggatggaattatcatcaaaaaacaatttattcagagaggcggtctcgatattgttacagccaagaaacatcaagtagaaattccattggaaaactttaataacaaagaaagagataggtctaacgcctattcaaaattagaaagtaatggattagttagactgaatgctttcttggaatccggagacgctatggcacgaaatatctcatcaagaactcttgaagatgattttgctagagataatcagattagcttcgatgtttccgagaaatataccgatatgtacaaatctcgcgttgaacgagtacaagtagaacttactgacaaagttaaggtacgagtattaaccatgaaagaaagaagacccattctaggagacaaatttaccactagaacgagtcaaaagggaacagtcgcgtatgtcgcggatgaaacggaacttccatacgacgaaaatggtatcacaccagatgtcattattaattctacatccatcttctctagaaaaactatatctatgttgatagaagttattttaacagccgcatattctgctaagccgtacaacaataagggagaaaaccgacctgtctgttttcctagtagtaacgaaacatccatcgatacatatatgcaattcgctaaacaatgttatgagcattcaaatccgaaattgtccgatgaagaattatcggataaaatcttttgtgaaaagattctctatgatcctgaaacggataagccttatgcatccaaagtattttttggaccaatttattacttgcgtctgaggcatttaactcaggacaaggcaaccgttagatgtagaggtaaaaagacgaagctcattagacaggcgaatgagggacgaaaacgtggaggaggtatcaagttcggagaaatggagagagactgtttaatagcgcatggtgcagccaatactattacagaagttttgaaagattcggaagaagattatcaagatgtgtatgtttgtgaaaattgtggagacatagcagcacaaatcaagggtattaatacatgtcttagatgttcaaaacttaatctctctcctctcttaacaaaaattgataccacgcacgtatctaaagtatttcttactcaaatgaacgccagaggcgtaaaagtcaaattagatttcgaacgaaggcctccttcgttttataaaccattagataaagttgatctcaagccgtcttttctggtgtaatattctagtttggtagtagatacatatcaatatcatcaaattcgagatccgaattataaaatgggcgtggattgttaactatagaatcggacgtctgatattcgaaaatctgtggagtttcaggttttggtggaggtgtaactgctacttgggatactgaagtctgatattcagaaagctgtggatgttctggttcggcatccaccgatggtgtcacatcactaatcggttcggtaacgtctgtggatggaggtgctacttctacagaacctgtagcctcagttgtcaacggagatacatttttaatgcgagaaaatgtataatttggtaatggtttcttatgtggatctgaagaagaggtaagatatctactagaaagataccgatcacgttctagttctcttttgtagaacttaactttttctttctccgcatctagttgatattccaacctcttcacgttactacgttcagattccaattcacgttcgcatgggttacctccgcagtttttacgagcgatttcacgttcagccttcatgcgtctctccctctctctatcgagtttatcagagcagtctttctgaaggcgatcgaactccataaatttctccaacgctttgattgtttccatagatttccgaagttcagcttttaggactgtgattctttttctttcgaattcacagctggatgtacaaccgtttccattaccgccatctctaagtttcttttctagatcggcaacatttcatccccatgccttttacattcctcgagtctactgtcgtcgaaatatcgttccagctccttttcgacatcaataactttagcacgttgtctctcaagctctcttttgtagttatctgattccctggcacgtttaagatcttcatgcaattgagtcagctcttaacttcctctcttgcttcttcgtcatagtacgcgcaatcactgtgagatccattgttaccacgtctacactcggcgagctcgcgtttaagagattcaatttcccgtttgtattggtccatgtttccattgctaccaccattagatttacaggctgctagttgtcgttcgagatcagaaatacgggttttcttggaattgatttcgtcgatgtacttggcatcgaaacacttattaagttctttttccaattctacgattttatttctttcgcgagtcaattccctcctgtagtaactatctgttttgtcagattcacgctctctacgtagactttcttgcaagttactaatttgttccctagcacgtccgagtttagttttatatgctgaatagagttctgattcatcctttgagcagatctctagcgatcgtttaagattcctaattctagtctttagcctatttacctcctcagaagatgttccgttaccgttgcgtttacactcgttaagctgtctatcaagatccatgattctatctctaagacgttgcatctctctttccatatcagcattgctttcattattacgtctgcagtcactcaactgtctttcaatatctgagattctatctctaagacgtcgcatctctctctgtttcggcattggtttcattattacgtttacagtcgttcaactgtctttcaagatctgatattctagattggagtctgctaatctctgtagcattttcacggcattcactcagttgtctttcaagatctgaaattttagattggagtctgctaatctctgtaagatttcctcctccgctctcgatgcagtcggtcaacttattctctagttctctaatacgcgaacgcagtgcatcaacttcttgcgtgtcttcctggttgcgtgtacattcatcgagtctagattcgagatctctaacgcgtcgtcgttcttcctcaagttctctgcgtactacagaaagcgtgtccttatcttgttgatatttagcaatttctgattctagagtactgattttgcttacgtagttactaatatttgtcttggccttatcaagatcctccttgtatttgtcgcattccttgatatccctacgaagtctggacagttcccattcgacattacgacgtttatcgatttcagctcggagatcgtcatcgcgttgttttagccacatacgactgagttcaagttctcgttgacaagatccatctacttttccattcctaatagtatccagttccttttctagttctgaacgcatttctcgttccctatcaagcgattctctcaattctcggatagtcttcttatcaatttctaataaatctgaaccatcatctgtcccattttgaatatccctgtgttctttgatctcttttgtaagtcggtcgattctttcggttttataaacagaatccctttccaaagtcctaatcttactgagtttatcactaagttctgcattcaattcggtgagttttctcttggcttcttccaactctgttttaaactctccactatttccgcattcttcctcgcatttatctaaccattcaattagtttattaataactagttggtaatcagcgattcctatagccgttcttgtaattgtgggaacataattaggatcttctaatggattgtatggcttgatagcatcatctttatcattattagggggatggacaaccttaattggttggtcctcatctcctccagtagcgtgtggttcttcaataccagtgttagtaataggcttaggcaaatgcttgtcgtacgcgggcacttcctcatccatcaagtatttataatcgggttctacttcagaatattcttttctaagagacgcgacttcgggagttagtagaagaactctgtttctgtatctatcaacgctggaatcaatactcaagttaaggatagcgaatacctcatcgtcatcatccgtatcttctgaaacaccatcatatgacatttcatgaagtctaacgtattgataaatagaatcagatttagtattaaacagatccttaacctttttagtaaacgcatatgtatattttagatctccagatttcataatatgatcacatgccttaaatgtcagtgcttccatgatataatctggaacactaatgggtgacgaaaaagatacagcaccatatgctacgttgataaataaatctgaaccactaagtagataatgattaatgttaagaaagaggaaatattcagtgtataggtatgtcttggcgtcatatcttgtactaaacacgctaaacagtttgttaatgtgatcaatttccaatagattaattagagcagcgggaataccaacaaacatattaccacatccgtattttctatgaatatcacatatcatgttaaaaaatcttgatagaagagcgaatatctcgtctgacttaatgagtcgtagttcagcagcaacataagtcataactgtaaatagaacatactttcctgtagtgttgattctagactccacatcaacaccattattaaaaatagttttatatacatctttaatctgctctccgttaatcgtcgaacgttctagtatacggaaacactttgatttcttatctgtagttaatgacttagtgatatcacgaagaatattacgaattacatttcttgtttttcttgagagacctgattcagaactcaactcatcgttccatagtttttctacctcagtggcgaaatctttggagtgcttggtacatttttcaataaggttcgtgacctccatttattataaaaaatttattcaaaacttaactacaatcgggtaattataaaatcgtagatctcccatgtggcggaatactaccatctatcgcatgtggatggacagtaggtaatggccatgggaacagtaatgtttgcatatttatctttcttgccagtattactgcatattgtcccaatgtttcgatgtgatgttctaacctatcaactgccgctgtatcacaacaatagtgtccgatgaaattaagattatgatccaatgtgtttaatatatgattatcaagtcttatacgatccgcgtcttttttgacaggatcaggttcttctacaggaagaagtttcggcctcttatgatattcatgtctgggaaacggtggtctagggtgaggctccggtatcggagtgggttttggattataatcatcatcgtctatgacatcatcttcgacttcgatatttattttgctatcttgatgatgtcctgtatcagttgcattttcagcactcgactgaatattagcgcattcattgtctattattaccatatttctaaacccaaaatgtatgtgttgaacatcagtactatcgttgatgagtcttatagcatgaattcgcttatcgttatcgggtttatcttctgtcaccttagcaattccttttttattaaactctacataatcatatccatttctattgtttgttctaatataaacgagtatagcatcattgctaaatttttcaatagtatcaaaaacagaatatcctaaaccatataatatatattcaggaacactcaaactaaatgtccaggattctcctaaatacgtaaactttaatagtgcgaaatcattcaaaaatctaccacttatagatagatagtacataaatgcgtatagtagtctacctatctctttattatgaaaaccggcattacgatcatatatgtcgtgatatacctgtgatccgtttacgttaaaccataaatacatgggtgatcctataaacatgaatttatttctaattctcagagctatagttaattgaccgtgtaatatttgcttacatgcatacttgatacgcttattaataagatttttatcattgctcgttatttcagaatcgtatatataaggagtaccatcgtgattcttaccagatattatacaaaatactatatataaaatatattgacccacgttagtaatcatataaatgtttaacgttttaaattttgtattcaatgatccattatcatacgctatcatggtcttgtaatattcattctttaaaatataatattgtgttagccattgcattggagctcctaatggagattttctattctcatccattttaggataggctttcataaagtccctaataacttcgtgaataatgtttctatgttttctactgatgcatgtatttgcttcgatttttttatcccatgtttcatctatcatagatttaaacgcagtaatgctcgcaacattaacatcttgaaccgttggtacaattccgttccataaatttataatgttcgccatttatataactcattttttgaatatacttttaattaacaaaagagttaagttactcatatggacgccgtccagtctgaacatcaatctttttagccagagatatcatagccgctcttagagtttcagcgtgattttccaacctaaatagaacttcatcgttgcgtttacaacacttttctatttgttcaaactttgttgttacattagtaatctttttttccaaattagttagccgttgtttgagagtttcctcattgtcgtcttcatcggctttaacaattgcttcgcgtttagcctctggctttttagcagcctttgtagaaaaaaattcagttgctggaattgcaagatcgtcatctccggggaaaagagttccgtccatttaaagtacagattttagaaactgacactctgcgttatttatatttggtacaacacatggattataaatattgatgttaataacatcagaaaatgtaaagtctatacattgttgcatcgtgttaaattttctaatggatctagtattattgggtccaacttctgcctgaaatccaaatatggaagcggatacaaaaccgtttcctggataaaccacacatctccacttttgctttacatcagaaattgtgtcgttgacatcttgaactctcctatctaatgccggtgttccacctatagattttgaatattcgaatgctgcatgagtagcattaaattccttaatattgccataattttcatatattgagtaaccctggataaaaagtaaacacaccgcagccgtcgctaccacaataaaaaaaattgatagagagttcatttataatctattagaagctgacaaaatttttttacacgcatcagacaatgctttaataaatagttcaacatctacttttgtcatatcgaaccgatggtatgattctaacctagaattacatccgaaaaagttgactatgttcatagtcattaagtcattaacaaacaacattccagactctggattataagacgatactgtttcgtcacaattacctaccttaatcatgtgattatgaatattggctattagagcaccttctaagaaatctataatatctttgaaacacgatttaaaatcaaaccacgaatatacttctacgaagaaagttagtttacccataggagaaataactataaatggagatctaaatacaaaatccggatctatgatagttttaacattattatattctctattaaatacctccacatctaaaaatgttaattttgaaactatgtcttcgtttattaccgtacctgaactaaacgctataagctctattgtttgagaactctttaaacgatattcttgaaatacatgtaacaaagtttcctttaactcggtcggtttatctaccatagttacagaatttgtatccttatctataatataataatcaaaatcgtataaagttatataattatcgcgttcagattgggatcttttcaaatagactaaaaaccccatttctctagtaagtatcttatgtatatgtttgtaaaatatcttcatggtgggaatatgctctaccgcagttagccattcctcattgacagcggtagatgtattagacaaaactattccaatgtttaacaagggccattttacgagattattaaatccttgtttgataaatgtagccaatgagggttcgagttcaacgacgattgaattctcttcccgcggatgctgcatgatgaacgacgggatgttgttcgattgatttggaattctttttcgactttttgtttatattaaatattttaaaatttatagcggatagcaattcatgtaccacggataatgtagacgcgtattgcgcatcgatatctttattattagataaatttatcaataaatgtgagaagtttgcctcgttaaggtcttccatttaaatattatataaacatttgtgtttgtaacttattcgtcttttatggaatagttttttactagtaaagctgcaattacacactttgtccgtaaaacataaatataaacaccagcttttatcaatcgttccaaaaagtcgacggcggacatttttaacatggcatctattttaaatacacttaggtttttggaaaaaacatcattttataattgtaacgattcaataactaaagaaaagattaagattaaacataagggaatgtcatttgtattttataagccaaagcattctaccgttgttaaatacttgtctggaggaggtatatatcatgatgatttggttgtattggggaaggtaacaattaataatctaaagatgatgctattttacatggatttatcatatcatggagtgacaagtagtggagcaatttacaaattgggatcgtctatcgatagactttctctaaataggactattgttacaaaagttaataattatgatgatacattttttgacgacgatgattgatcgctattgcacaattttgtttttgtactttctaatatagtgtttaggttctttttcatatgagaatattgatttactaaaatatctatgtttaacttttgttctatgacgtccttatcggcggtatcggtacatatacgtaattcaccttcacaaaatacggagtcttcgataataatagccaatcgattattggatctagctgtctgtatcatattcaacatgtttaatatatcctttcgtttcccctttacaggcatcgatcgtagcatattttccgcgtctgatatggaaatgttaaaactacaaaaatgcgtaatgttagcccgtcctaatattggtacgtgtctataagtttggcatagtagaataatagacgtgtttaaatgccttccaaagtttaagaattctattagagtattgcattttgatagtttatcgcctacatcatcaaaaataagtaaaaagtgtgctgattttttatgattttgtgcgacagcaatacatttttctatgttacttttagttcgtatcagattatattctagagattcctgactactaacgaaattaatatgatttggccaaatgtatccatcataatctgggttataaacgggtgtaaacaagaatatatgtttatattttttaactagtgtagaaaacagagatagtaaatagatagtttttccagatccagatcctcctgttaaaaccattctaaacggcatttttaataaattttctcttgaaaattgtttttcttggaaacaattcataattatatttacagttactaaattaatttgataataaatcaaaatatggaaaactaaggttgttagtagggaggagaacaaagaaggcacatcgtgatataaataacatttattatcatgatgacaccagaaaacgacgaagagcagacatctgtgttctccgctactgtttacggagacaaaattcagggaaagaataaacgcaaacgcgtgattggtctatgtattagaatatctatggttatttcactactatctatgattaccatgtccgcgtttctcatagtgcgcctaaatcaatgcatgtctgctaacgaggctgctattactgacgccgctgttgccgttgctgctgcatcatctactcatagaaaggttgcgtctagcactacacaatatgatcacaaagaaagctgtaatggtttatattaccagggttcttgttatatattacattcagactaccagttattctcggatgctaaagcaaattgcactgcggaatcatcaacactacccaataaatccgatgtcttgactacctggctcattgattatgttgaggatacatggggatctgatggtaatccaattacaaaaactacatccgattatcaagattctgatgtatcacaagaagttagaaagtatttttgtgttaaaacaatgaactaatatttatttttgtacattaataaatgaaatcgcttaatagacaaactgtaagtaggtttaagaagttgtcggtgccggccgctataatgatgatactctcaaccattattagtggcataggaacatttctgcattacaaagaagaactgatgcctagtgcttgcgccaatggatggatacaatacgataaacattgttatttagatactaacattaaaatgtctacagataatgcggtttatcagtgtcgtaaattacgagctagattgcctagacctgatactagacatctgagagtattgtttagtattttttataaagattattgggtaagtttaaaaaagaccaatgataaatggttagatattaataatgataaagatatagatattagtaaattaacaaattttaaacaactaaacagtacgacggatgctgaagcgtgttatatatacaagtctggaaaactggttaaaacagtatgtaaaagtactcaatctgtactatgtgttaaaaaattctacaagtgacaacaaaaaatgaattaataataagtcgttaacgtacgccgccatggacgccgcgtttgttattactccaatgggtgtgttgactataacagatacattgtatgatgatctcgatatctcaatcatggactttataggaccatacattataggtaacataaaaactgtccaaatagatgtacgggatataaaatattccgacatgcaaaaatgctactttagctataagggtaaaatagttcctcaggattctaatgatttggctagattcaacatttatagcatttgtgccgcatacagatcaaaaaataccatcatcatagcatgcgactatgatatcatgttagatatagaagataaacatcagccattttatctattcccatctattgatgtttttaacgctacaatcatagaagcgtataacctgtatacagctggagattatcatctaatcatcaatccttcagataatctgaaaatgaaattgtcgtttaattcttcattctgcatatcagacggcaatggatggatcataattgatgggaaatgcaatagtaattttttatcataaaagttgtaaagtaaataataaaacaataaatattgaactagtagtacgtatattgagcaatcagaaatgatgctggtacctcttatcacggtgaccgtagttgcgggaacaatattagtatgttatatattatatatttgtaggaaaaagatacgtactgtctataatgacaataaaattatcatgacaaaattaaaaaagataaagagttctaattccagcaaatctagtaaatcaactgatagcgaatcagactgggaggatcactgtagtgctatggaacaaaacaatgacgtagataatatttctaggaatgagatattggacgatgatagcttcgctggtagtttaatatgggataacgaatccaatgttatggcgcctagcacagaacacatttacgatagtgttgctggaagcacgctgctaataaataatgatcgtaatgaacagactatttatcagaacactacagtagtaattaatgaaacggagactgttgaagtacttaatgaagataccaaacagaatcctaactattcatccaatcctttcgtaaattataataaaaccagtatttgtagcaagtcaaatccgtttattacagaacttaacaataaatttagtgagaataatccgtttagacgagcacatagcgatgattatcttaataagcaagaacaagatcatgaacacgatgatatagaatcatcggtcgtatcattggtgtgattagtttcctttttataaaattgaagtaatatttagtattattgctgccgtcacgttgtacaaatggagatattccctgtattcggcatttctaaaattagcaattttattgctaataatgactgtagatattatatagatacagaacatcaaaaaattatatctgatgagatcaatagacagatggatgaaacggtacttcttaccaacatcttaagcgtagaagttgtaaatgacaatgagatgtaccatcttattcctcatagattatcgacgattatactctgtattagttctgtcggaggatgtgttatctctatagataatgacatcaatggcaaaaatattctaacctttcccattgatcatgctgtaatcatatccccactgagtaaatgtgtcgtagttagcaagggtcctacaaccatattggttgttaaagcggatatacctagcaaacgattggtaacatcgtttacaaacgacatactatatgtaaacaatctgtcactgattaattatttgccgttgtctgtattcattattagacgagtcaccgactatttggatagacacatatgcgatcagatatttgctaataataagtggtattcccttataaccatcgacgataagcaatatcctattccatcaaactgtataggtatgtcctctgccaagtacataaattctagcatcgagcaagatactttaatccatgtttgtaacctcgagcatccgttcgactcagtatacaaaaaaatgcagtcgtacaattctctacctatcaaggaacaaatattgtacggtagaattgataatataaatatgagcattagtatttctgtggattaatagatttctagtatggggatcattaatcatctctaatctctaaatacctcataaaacgaaaaaaaagctattatcaaatactgtacggaatggattcattctcttctctttttatgaaactctgttgtatatctactgataaaactggaagcaaaaaatctgatagaaagaataagaataagatcaaggattatatggaacacgattattataaaataacaatagttcctggttcctcttccacgtctactagctcgtggtattatacacatgcctagtaatagtctctttgcgttgacggaaagcagactagaaataacaggctaaaatgttcagacaccataatagttcccaacccagataataacagagttccatcaacacattcctttaaactcaatcccaaacccaaaaccgttaaaatgtatccggccaattgatagtagataatgaggtgtacagcgcatgataatttacacagtaaccaaaatgaaaacactttagtaattataagaaatatagacggtaatgtcatcatcaacaatccgataatatgcctgagagtaaacattgatggataaaacaaaaatgctccgcataactctatcatggcaataacacaaccaaacacttgtaaaattcctaaattagtagaaaatacaacggatatcgatgtataagtgatctcgagaaataataagaataaagtaatgcccgtaaagataaacatcaacattgtttggtaatcattaaaccaattagtatgaagttgaactaatttcacagtagattttattccagtgttatcctcgcatgtataagtacctggtaagatatctttatattccataatcaatgagacatcactatccgataacgaatgaagtctagcactagtatgccatttacttaatattgtcgtcttggaagttttattataagttaaaatatcatggttatccaatttccatctaatatactttgtcggattatctatagtacacggaataatgatggtatcattacatgctgtatactctatagtctttgtagttgttataacaaccaacgtatagaggtatatcaacgatattctaactcttgacattttttatttatttaaaatgatacctttgttatttattttattctattttgctaacggtattgaatggcataagtttgaaacgagtgaagaaataatttctacttacttattagacgacgtattatacacgggtgttaatggggcggtatacacattttcaaataataaactaaacaaaactggtttaactaataataattatataacaacatctataaaagtagaggatgcggataaggatacattagtatgcggaaccaataacggaaatcccaaatgttggaaaatagacggttcagacgacccaaaacatagaggtagaggatacgctccttatcaaaatagcaaagtaacgataatcagtcacaacggatgtgtactatctgacataaacatatcaaaagaaggaattaaacgatggagaagatttgacggaccatgtggttatgatttatacacggcggataacgtaattccaaaagatggtttacgaggagcattcgtcgataaagatggtacttatgacaaagtttacattcttttcactgatactatcggctcaaagagaattgtcaaaattccgtatatagcacaaatgtgcctaaacgacgaaggtggtccatcatcattgtctagtcatagatggtcgacgtttctcaaagtcgaattagaatgtgatatcgacggaagaagttatagacaaattattcattctagaactataaaaacagataatgatacgatactatatgtattcttcgatagtccttattccaagtccgcattatgtacctattctatgaataccattaaacaatctttttctacgtcaaaattggaaggatatacaaagcaattgccgtctccagctcctggtatatgtctaccagctggaaaagttgttccacataccacgtttgaagtcatagaaaaatataatgtactagatgatattataaagcctttatctaaccaacctatcttcgaaggaccgtctggtgttaaatggttcgatataaaggagaaggaaaatgaacatcgggaatatagaatatacttcataaaagaaaattctatatattcgttcgatacaaaatctaaacaaactcgtagctcgcaagtcgatgcgcgactattttcagtaatggtaactgcgaaaccgttatttatagcagatatagggataggagtaggaatgccacaaatgaaaaaaatacttaaaatgtaatcttaatcgagtacaccacacgacaatgaacaaacataagacagattatgctggttatgcttgctgcgtaatatgcggtctaattgttggaattatttttacagcgacactattaaaagttgtagaacgtaaattagttcatacaccatcaatagataaaacgataaaagatgcatatattagagaagattgtcctactgactggataagctataataataaatgtatccatttatctactgatcgaaaaacctgggaggaaggacgtaatgcatgcaaagctctaaattcaaattcggatctaattaagatagagactccaaacgagttaagttttttaagaagccttagacgaggctattgggtaggagaatccgaaatattaaaccagacaaccccatataattttatagctaagaatgccacgaagaatggaactaaaaaacggaaatatatttgtagcacaacgaatactcccaaactgcattcgtgttacactatataacaattacactacatttttatcataccactacttcggttagatgttttagaaaaaaataaatatcgccgtaccgttcttgtttttataaaaataacaattaacaattatcaaattttttctttaatattttacgtggttgaccattcttggtggtaaaataatctcttagtgttggaatggaatgctgtttaatgtttccacactcatcgtatattttgacgtatgtagtcacatcgtttacgcaatagtcagactgtagttctatcatgcttcctacatcagaaggaggaacagttttaaagtctcttggttttaatctattaccgttagttttcatgaaatcctttgttttatccacttcacattttaaataaatgtccactatacattcttttgttaattttactagatcgtcatgggtcatagaatttataggttccgtagtccatggatccaaactagcaaacttcgcgtatacggtatcgcgattagtgtatacaccaactgtatgaaaattaagaaaacagtttaatagatcaacagaaatatttaatcctccgtttgatacagatgcgccatatttatggatttcggattcacacgttgtttgtctgaggtgttcgtctagcgttgcttctacgtaaacttcgattcccatatattctttattgtcagaatcgcataccgatttatcatcatacactgtttgaaaactaaatggtatacacatcaaaataataaatactaacgagtacattctgcaatattgttatcgtaattggaaaattagtgttcgagtgagtcggattatgtgagtactggattttatattttgtaataagaataaaatgctaatgtcaagtcttattaaaaacatatataataaataacaatggctgaatggcataaaattatcgaggatatctcaaaaaataataagttcgaggatgccgccatcgttgattacaagactacaaagaatgttctagctgctattcctaacagaacatttgccaagattaatccgggtgaaattattcctctcatcactaatcgtaatattctaaaacctcttattggtcagaaatattgtattgtatatactaactctctaatggatgagaacacgtatgctatggagttgcttactgggtacgcccctgtatctccgatcgttatagcgagaactcataccgcacttatatttttgatgggtaagccaacaacatccagacgtgacgtgtatagaacgtgtagagatcacgctacccgtgtacgtgcaactggtaattaaaataaaaagtaatattcatatgtagtgtcaattttaaatgatgatgatgaaatggataatatccatattgacgatgtcaataatgccggtattggcatacagttcatcgatttttagatttcattcagaggatgtggaattatgttatgggcatttgtattttgataggatctataatgtagtaaatataaaatataatccgcatattccatatagatataattttattaatcgcacgttaaccgtagatgaactagacgataatgtcttttttacacatggttattttttaaaacacaaatatggttcacttaatcctagtttgattgtctcattatcaggaaacttaaaatataatgatatacaatgctcagtaaatgtatcgtgtctcattaaaaatttggcaacgagtacatctactatattaacatctaaacataagacttattctctacatcggtccacgtgtattactataataggatacgattctattatatggtataaagatataaatgacaagtataatgacatctatgattttactgcaatatgtatgctaatagcgtctacattgatagtgaccatatacgtgtttaaaaaaataaaaatgaactcttaattatgctatgctattagaaatggataaaatcaaaattacggttgattcaaaaattggtaatgttgttaccatatcgtataacttggaaaagataactattgatgtcacacctaaaaagaaaaaagaaaaggatgtattattagcgcaatcagttgctgtcgaagaggcaaaagatgtcaaggtagaagaaaaaaatattatcgatattgaagatgacgatgatatggatgtagaaagcgcgtaatacgatctataaaaataagtatataaatactttttatttactgtactcttactgtgtagtggtgataccctactcgattatttttttaaaaaaaaaatacttattctgattcttctagccatttccgtgttcgtttgaatgccacatcgacgtcaaagataggggagtagttgaaatctagttctgcattgttggtacgcacctcaaatgtagtgttggatatcttcaacgtatagttgttgagtagtgatggttttctaaatagaattctcttcatatcattcttgcacgcgtacatttttagcatccatcttggaatcctagatccttgttctattcccaatggtttcatcaatagaagattaaacatatcgtacgaacacgatggagagtaatcgtagcaaaagtaagcatttcctttaatcttagatcccggatactggatatattttgcagccaacacgtgcatccatgcagcatttcctacatatacccggctatgcaccgcgtcatcatcgactgtacgatacataatgttaccgtgttgcttacattgctcgtaaaagactttcatcaatttgtctccttctccgtaaattccagtgggtcttaggcaacaagtatacaattttgctccattcatgattacggaattattggctttcataaccagttgctcggccatacgtttactttttgcgtatacatgtcctggtgatatatcataaagggtatgctcatggccgatgaatggatcaccgtgtttattgggtcctattgcttccatgctactagtatagatcaaatacttgattcctaggtccacacaagctgccaaaatagtctgtgttccataatagtttactttcatgatttcattatcggtgtattttccaaatacatccactagagcagccgtatgaataatcagatttaccccatctagcgcttctctcaccttatcaaagtcgtttatatcacattgtatatagtttataaccttaactttcgaggttattggttgtggatcttctacaatatctatgactctgatttcttgaacatcatctgcactaattaacagttttactatatacctgcctagaaatccggcaccaccagtaaccgcgtacacggccattgctgccactcataatatcagactacttattctattttactaaataatggctgtttgtataatagaccacgataatatcagaggagttatttactttgaaccagtccatggaaaagataaagttttaggatcagttattggattaaaatccggaacgtatagtttgataattcatcgttacggagatattagtcaaggatgtgattccataggcagtccagaaatatttatcggtaacatctttgtaaacagatatggtgtagcatatgtttatttagatacagatgtaaatatatttacaattattggaaaggcgttatctatttcaaaaaatgatcagagattagcgtgtggagttattggtatttcttacataaatgaaaagataatacattttcttacaattaacgagaatggcgtttgatatatcagttaatgcgtctaaaacaataaatgcattagtttacttttctactcagcaaaataaattagtcatacgtaatgaagttaatgatacacactacactgtcgaatttgatagggacaaagtagttgacacgtttatttcatataatagacataatgacaccatagagataagaggggtgcttccagaggaaactaatattggttgcgcggttagtatgacttacttgtataataagtatagttttaaactgattttagcagaatatataagacacagaaatactatatccggcaatatttattcggcattgatgacactagatgatttggctattaaacagtatggagacattgatctattatttaatgagaaacttaaagtagactccgattcgggactatttgactttgtcaactttgtaaaggatatgatatgttgtgattctagaatagtagtagctctatctagtctagtatctaaacattgggaattgacaaataaaaaatataggtgtatggcattagccgaacatatatctgatagtattccaatatctgagctatctagactacgatacaatctatgtaagtatctacgcggacacactgagagcatagaggataaatttgattattttgaagacgatgattcgtctacatgttctgccgtaaccgacagggaaacggatgtataattttttttatagcgtgaaggatatgataaaaaatataattgttgtatttatcccattccaatcaccttatatgattctgtaacacaataaaggagtcttatagatgtatagaggtcagatactggtttgataaactgtttattccacataagtatgtttgactttatggttagacccgcatactttaacaaatcactgaaaattggagttaggtattgacctctcagaatcagttgccgttctggaacattaaatgtattttttatgatatactccaacgcatttatgtgggcatacaacaagtcattactaatggagtattccaagagttttagttgtctagtatttaacaagagaagagatttcaacagactgtttatgaactcgaatgccgcctcattgtcgcttatattgatgatgtcgaattctcccaatatcatcaccgatgagtagctcatcttgttatcgggatccaagttttctaaagatgtcattaaaccctcgatcatgaatggatttatcatcatcgtttttatgttggacatgagcttagtccgtttgtccacatctatagacgacgatttctgaattatttcatatatctctctctttaactccaggaacttgtcaggatggtctactttaatatgttctcgtctaagagatgaaaatctttggatggttgcacgcgacttttctctaaaggatgacgttgcccaagatcctctcttaaatgaatccatcttatccttggacaagatggacagtctattttccttagatggtttaatatttttgttacccatgatctataaaggtagacctaatcgtctcggatgaccatatatttattttcagttttattatacgcataaattgtaaaaaatatgttaggtttacaaaaatgtctcgtggggcattaatcgtttttgaaggattggacaaatctggaaaaacaacacaatgtatgaacatcatggaatctataccggcaaacacgataaaatatcttaactttcctcagagatccactgtcactggaaaaatgatagatgactatctaactcgtaaaaaaacctataatgatcatatagttaatctattattttgtgcaaatagatgggagtttgcatcttttatacaagaacaactagaacagggaattactttaatagttgatagatacgcattttctggagtagcgtatgccgccgctaaaggcgcgtcaatgactctcagtaagagttatgaatctggattgcctaaacccgacttagttatattcttggaatctggtagcaaagaaattaatagaaacgtcggtgaggaaatttatgaagatgttacattccaacaaaaggtattacaagaatataaaaaaatgattgaagaaggagatattcattggcaaattatttcttctgaattcgaggaagatgtaaagaaggagttgattaagaatatagttatagaggctatacacacggttactggaccagtggggcaactgtggatgtaatagtgaaattacattttttataaatagatgttagtacagtgttataaatggatgaagcatattactctggcaacttggaatcagtactcggatacgtgtccgatatgcataccgaactcgtatcaatatctcaattagttattgccaagatagaaactatagataatgatatattaaacaaggacattgtaaattttatcatgtgtagatcaaacttggataatccatttatctctttcctagatactgtatatactattatagatcaagagaactatcagactgagttgattaattcattagacgacaatgaaattatcgattgtatagttaataagtttatgagcttttataaggataacctagaaaatatagtagatgctatcatcactctaaaatatataatgaataatccagattttaaaactacgtatgcagaagtactcggttccagaatagcggatatagatattaaacaagtgatacgtgagaatatactacaattgtctaataatatccgcgaacgatatttgtgaaaaatattaaaaaaaaatactttttttattaaatgacgtcgcttcgcgaatttagaaaattatgctgtgatatatatcacgcatcaggatataaagaaaaatctaaattaattagagactttataacagatagggatgataaatatttgatcattaagctattgcttcccggattagacgatagaatttataacatgaacgataaacaaattataaaattatatagtataatatttaaacaatctcaggaagatatgctacaagatttaggatacggatatataggagacactattaggactttcttcaaagagaacacagaaatccgtccacgagataaaagcattttaactttagaagaagtggatagtttcttaactacgttatcatccgtaactaaagaatcgcatcaaataaaattattgactgatatcgcatccgtttgtacatgtaatgatttaaaatgtgtagtcatgcttattgataaagatctaaaaattaaagcgggtcctcggtacgtacttaacgctattagtcctcatgcctatgatgtgtttagaaaatctaataacttgaaagagataatagaaaattcatctaaacaaaatctagactctatatctatttctgttatgactccaattaatcccatgttagcggaatcgtgtgattctgtcaataaggcgtttaaaaaatttccatcaggaatgtttgcggaagtcaaatacgatggtgaaagagtacaagttcataaaaataataacgagtttgccttctttagtagaaacatgaaaccagtactctctcataaagtggattatctcaaagaatacataccgaaagcatttaaaaaagctacgtctatcgtattggattctgaaattgttcttgtagacgaacataatgtaccgctcccgtttggaagtttaggaatacacaaaaagaaagaatataaaaactctaacatgtgtttgttcgtgtttgactgtttgtactttgatggattcgatatgacggacattccattgtacgaacgaagatcttttctcaaagatgttatggttgaaatacccaatagaatagtattctcagagttgacgaatattagtaacgagtctcagttaactgacgtattggatgatgcactaacgagaaaattagaaggattggtcttaaaagatattaatggagtatacgaaccgggaaagagaagatggttaaaaataaagcgagactatttgaacgagggttccatggcagattctgccgatttagtagtactaggtgcctactatggtaaaggagcaaagggtggtatcatggcagtctttctaatgggttgttacgacgatgaatccggtaaatggaagacggttaccaagtgttcaggacacgatgataatacgttaagggagttgcaagaccaattaaagatgattaaaattaacaaggatcccaaaaaaattccagagtggttagtagttaataaaatctatattcccgattttgtagtagaggatccgaaacaatctcagatatgggaaatttcaggagcagagtttacatcttccaagtcccataccgcaaatggaatatccattagatttcctagatttactaggataagagaggataaaacgtggaaagaatctactcatctaaacgatttagtaaacttgactaaatcttaatagttacatacaaactgaaaattaaaataacactatttagttggtggtcgccatggatggtgttattgtatactgtctaaacgcgctagtaaaacatggcgaggaaataaatcatataaaaaatgatttcatgattaaaccatgttgtgaaagagtttgtgaaaaagtcaagaacgttcacatcggcggacaatctaaaaacaatacagtgattgcagatttgccatatctggataatgctgtatcggatgtatgcaattcactgtataaaaagaatgtatcaagaatatccagatttgctaatttgataaagatagatgacgatgacaagactcctactggtgtatataattattttaaacctaaagatgccattcctgttattatatctataggaaaggatagagatgtctgtgaactattaatctcatcagacatatcgtgtgcatgcgtggagttaaattcatatcacgtagccattcttcccatggatgtttccttttttaccaaaggaaatgcatcattgattattctcctgtttgatttctctatcgatgcggcacctctcttaagaagtgtaaccgataataatgttattatatctagacaccagcgtctacatgacgagcttccgagttccaattggttcaagttttacataagtataaagtccgactattgttctatattatatatggttgttgatggatctgtgatgcatgcgatagctgataatagaactcacgcaattattagcaaaaatatattagacaatactacgattaacgatgagtgtagatgctgttattttgaaccacagattaggattcttgatagagatgagatgctcaatggatcatcgtgtgatatgaacagacattgtattatgatgaatttacctgatgtaggcgaatttggatctagtatgttggggaaatatgaacctgacatgattaagattgctctttcggtggctggtaatttaataagaaatcgagactacattcccgggagacgaggatatagctactacgtttacggtatagcctctagataatttttttaagcacgaaataaaaaacataattttaaaccaatctatttcatactattttgtgtgatcaccatggacataaagatagatattagtatttctggtgataaatttacggtgactactaggagggaaaatgaagaaagaaaaaaatatctacctctccaaaaagaaaaaactactgatgttatcaaacctgattatcttgagtacgatgacttgttagatagagatgagatgtctactattctagaggaatattttatgtacagaggtctattaggcctcagaataaaatatggacgactctttaacgaaattaaaaaattcgacaatgatgcggaagaacaattcggtactatagaagaactcaagcagaaacttagattaaattctgaagagggagcagataactttatagattatataaaggtacaaaaacaggatatcgtcaaacttactgtatacgattgcatatctatgataggattgtgtgcatgcgtggtagatgtttggagaaatgagaaactgttttctagatggaaatattgtttacgagcgattaaactgtttattaatgatcacatgcttgataagataaaatctatactgcagaatagactagtatatgtggaaatgtcatagaaagttaaaagttaatgagagcaaaaatatataaggttgtattccatatttgttattttttctgtaatagttaaaaaatacattcgatggtctatctatcagattattatgtgttataaggtactttttctcataataaactagagtatgagtaagatagtgtttttcaaaacatataaatctaaaattgatggatgagatatacagctattaatttcgaaaatatattttaatctgataactttaaacatggatttttgatggtggtttaacgttttaaaaaaagattttgttattgtagtatatgataatattaaaagatggatataaagaatttgctgactgcatgtactattttttacattactacattggctacggcagatatacctacttcgtcactgccacacgctccggtaaacggggcatgtgacgagggagaatatcttgataagaggcataatcaatgttgtaatcagtgtccacctggagaatttgccaaggtcagatgtaatggtaacgataacacaaaatgtgaacgctgcccacctcatacatataccgcaatccccaattactctaatggatgtcatcaatgtagaaaatgcccaacaggatcatttgataaggtaaagtgtaccggaacacagaacagtaaatgttcgtgtcttcctggttggtattgcgctactgattcttcacagactgaagattgtcgagattgtataccaaaaaggagatgtccatgcggatactttggtggaatagatgaacaaggaaatcctatttgtaaatcgtgttgtgttggtgaatattgcgactacctacgtaattatagacttgatccatttcctccatgcaaactatctaaatgtaattaattatgattttgatgataatgttaccatacattatatcgctacttggttagtgtattattcagtatgaagacctattaataattacttatcttttgacgatcttgttataattataatataaaaacttatggcatagtaacttataattgctgacgcgataaattcgtaataatctgttttgttcaaaggaatctacaggcataaaaataaaaatataatttataatatactcttacagcgcgccatcatgaataacagcagtaaattaattgctgttattaatggatttagaaatagtggacgattttgtgatattaatatagttattaatgatgaaaggataaacgctcacagactcatcctatctggagcctccgaatatttttccattctgttttccaataattttatcgattctaatgaatacgaagttaatctaagtcatttagattatcaaagcgtaaacgatttgatcgattacatttatgggatacctttgagcctaactaacgataacgtgaaatatattctttcaaccgctgattttttacaaattggatctgctattacggagtgtgaaaattacatacttaaaaatctttgttctagaaactgtatcgatttctacatatacgctgataaatataataacaagaaaatagaatcagcgtcgtttaacacaatattacaaaatattttgagactcatcaacgatgaaaactttaaatacttaacagaggaatcaatgataaaaattttaagcgatgatatgttaaatataaaaaatgaggatttcgccccactaattctcattaaatggttagagagtactcaacaaccatgcaccgtcgagttacttaaatgcctcagaatatcattgctttccccacaagttataaaatcactttatagtcatcgactggttagttcaatctacgaatgtataacattcttaaacaatatagcattcttggatgaatcatttcctagataccatagcatcgagttgatatctatcggtataagtaattcgcatgataagatttccataaactgctacaatcataaaaaaaatacatgggaaatgatatcttcacgtagatataggtgtagtttcgcagtggccgtcctggataatattatttatatgatgggtggatatgatcagtccccgtatagaagttcaaaggttatagcgtacaatacatgtacaaattcttggatatatgatataccagagctaaaatatcctcgttctaattgtgggggactggctgatgacgaatacatttattgtataggcggcatacgcgatcaggattcatcgttgacatctagtattgatagatggaagccatcaaaaccatattggcagaagtatgctaaaatgcgcgaaccaaaatgtgatatgggggttgcgatgttaaacggattaatatatgttataggtggaatcgttaaaggtgacacgtgtaccgacgcactagagagtttatcagaagatggatggatgaagcatcaacgtcttccaataaaaatgtccaatatgtcgacgattgttcatgatggcaagatttatatatctggaggttacaacaatagtagtgtagttaatgtaatatcgaatttagtccttagctataattcgatatatgatgaatggaccaaattatcatcattaaacattcctagaattaatcccgctctatggtcagcgcataataaattatatgtaggaggaggaatatctgatgatgttcgaactaatacatctgaaacatacgacaaagaaaaagattgttggacattggataatggtcacgtgttaccacgcaattatataatgtataaatgcgaaccgattaaacataaatatccattggaaaaaacacagtacacgaatgattttctaaagtatttggaaagttttataggtagttgatagaacaaaatacataattttgtaaaaataaatcactttttatactaatatgacacgattaccaatacttttgttactaatatcattagtatacgctacaccttttcctcagacatctaaaaaaataggtgatgatgcaactctatcatgtaatcgaaataatacaaatgactacgttgttatgagtgcttggtataaggagcccaattccattattcttttagctgctaaaagcgacgtcttgtattttgataattataccaaggataaaatatcttacgactctccatacgatgatctagttacaactatcacaattaaatcattgactgctagagatgccggtacttatgtatgtgcattctttatgacatcgcctacaaatgacactgataaagtagattatgaagaatactccacagagttgattgtaaatacagatagtgaatcgactatagacataatactatctggatctacacattcaccggaaactagttctgagaaacctgattatatagataattctaattgctcgtcggtattcgaaatcgcgactccggaaccaattactgataatgtagaagatcatacagacaccgtcacatacactagtgatagcattaatacagtaagtgcatcatctggagaatccacaacagacgagactccggaaccaattactgataaagaagatcatacagtcacagacactgtctcatacactacagtaagtacatcatctggaattgtcactactaaatcaaccaccgatgatacgtacaatgataatgatacagtaccaccaactactgtaggcggtagtacaacctctattagcaattataaaaccaaggactttgtagaaatatttggtattaccgcattaattatattgtcggccgtggcaatattctgtattacgtattatatatgtaataaacgttcacgtaaatacaaaacagagaacaaagtctagatttttgacttacataaatgtctgggatagtaaaatctatcatattgagcgggccatctggtttaggaaagacagccatagccaaaagactatgggaatatatttggatttgtggtgtcccataccactagatttcctcgtcctatggaacgagaaggtgtcgattaccattacgttaacagagaggccatctggaagggaatagccgccggaaactttctagaacatactgagtttttaggaaatatttacggaacttctaaaactgctgtgaatacagcggctattaataatcgtatttgtgtgatggatctaaacatcgatggcgttagaagtcttaaaaatacgtacctaatgccttactcggtgtatataagacctacctctcttaaaatggttgagaccaagcttcgttgtagaaacactgaagcggatgatgagattcatcgtcgtgtgatgttggcaaaaactgacatggatgaggcaggtgaagccggtctattcgacactattatcattgaagatgatgtgaatttagcatatagtaagttaattcagatactacaggaccgtattagaatgtattttaacactaattagagacttaagacttaaaacttgataattaataatataactcgtttttatatgtggctatttcaacgtctaatgtattagttaaatattaaaacttaccacgtaaaacttaaaatttaaaatgatatttcattgacagatagatcacacattatgaactttcaaggacttgtgttaactgacaattgcaaaaatcaatgggtcgttggaccattaataggaaaaggtggattcggtagtatttatactactaatgacaataattatgtagtaaaaatagagcccaaagctaacggatcattatttaccgaacaggcattttatactagagtacttaaaccatccgttatcgaagaatggaaaaaatctcacaatataaagcacgtaggtcttatcacgtgcaaggcatttggtctatacaaatccattaatgtggaatatcgattcttggtaattaatagattaggtgcagatctagatgcggtgatcagagccaataataatagattaccaaaaaggtcggtgatgttgatcggaatcgaaatcttaaataccatacaatttatgcacgagcaaggatattctcacggagatattaaagcgagtaatatagtcttggatcaaatagataagaataaattatatctagtggattacggattggtttctaaattcatgtctaatggcgaacatgttccatttataagaaatccaaataaaatggataacggtactctagaatttacacctatagattcgcataaaggatacgttgtatctagacgtggagatctagaaacacttggatattgtatgattagatggttgggaggtatcttgccatggactaagatatctgaaacaaagaattgtgcattagtaagtgccacaaaacagaaatatgttaacaatactgcgactttgttaatgaccagtttgcaatatgcacctagagaattgctgcaatatattaccatggtaaactctttgacatattttgaggaacccaattacgacaagtttcggcacatattaatgcagggtgtatattattaagtgtggtgtttggtcgataaaaattaaaaaataacttaatttattattgatctcgtgtgtacaaccgaaatcatggcgatgttttacgcacacgctctcggtgggtacgacgagaatcttcatgcctttcctggaatatcatcgactgttgccaatgatgtcaggaaatattctgttgtgtcagtttataataacaagtatgacattgtaaaagacaaatatatgtggtgttacagtcaggtgaacaagagatatattggagcactgctgcctatgtttgagtgcaatgaatatctacaaattggaaatccgatccatgatcaagaaggaaatcaaatctctatcatcacatatcgccacaaaaactactatgctctaagcggaatcgggtacgagagtctagacttgtgtttggaaggagtagggattcatcatcacgtacttgaaacaggaaacgctgtatatggaaaagttcaacatgattattctactatcaaagagaaggccaaagaaatgagtgcacttagtccaggacctatcatcgattaccacgtctggataggagattgtatctgtcaagttactgctgtggacgtacatggaaaggaaattatgaaaatgagattcaaaaagggtgcggtgcttccgatcccaaatctggtaaaagttaaacttggggagaatgatacagaaaatctttcttctactatatcggcgacaccatcgaggtaaccacctctctggaagacagcgtgaataatgtactcatgaaacgtttggaaactatacgccatatgtggtctgttgtatatgatcattttgatattgtgaatggtaaagaatgctgttatgtgcatacgcatttgtctaatcaaaatcttataccgagtactgtaaaaacaaatttgtacatgaagactatgggatcatgcattcaaatggattccatggaagctctagagtatcttagcgaactgaaggaatcaggtggatggagtcccagaccagaaatgcaggaatttgaatatccagatggagtggaagacactgaatcaattgagagattggtagaggagttcttcaatagatcagaacttcaggctggtgaatcagtcaaatttggtaattctattaatgttaaacatacatctgtttcagctaagcaactaagaacacgtatacggcagcagcttccttctatactctcatcttttaccaacacaaagggtggatatttgttcattggagttgataataatacacacaaagtatttggattcacggtgggttacgactacctcagactgatagagaatgatatagaaaagcatatcaaaagactttgtgttgtgtatttctgtgagaagaaagaggacatcaagtacgcgtgtcgattcatcaaggtatataaacctggggatgaggctacctcgacatacgtgtgcgctatcaaagtggaaagatgctgttgtgctgtgtttgcagattggccagaatcatggtatatggatactaatggtatcaagaagtattctccagatgaatgggtgtcacatataaaattttaattaatgtaactatagagaacaaataataaggttgtaatatcatatagacaataactaacaattaattagtaactgttatctcttttttaattaaccaactaactatatacctattaatacatcgtaattatagttcttaacatctattaatcattaattcgcttctttaattttttataaactaacattgttaattgaaaagggataacatgttacagaatataaattatatatggatttttttaaaaaggaaatacttgactggagtatatatttatctcttcattatatagcacgcgtgttttccaatttttccacatcccatataatacaggattataatctcgttcgaacatacgagaaagtggataaaacaatagttgattttttatctaggttgccaaatttattccatattttagaatatggggaaaatattctacatatttattctatggatgatgctaatacgaatattataattttttttctagatagagtattaaatattaataagaacgggtcatttatacacaatctcgggttatcatcatccattaatataaaagaatatgtatatcaattagttaataatgatcatccagataataggataagactaatgcttgaaaatggacgtagaacaagacattttttgtcctatatatcagatacagttaatatctatatatgtattttaataaatcatggattttatatagatgccgaagacagttacggttgtacattattacatagatgtatatatcactataagaaatcagaatcagaatcatacaatgaattaattaagatattgttaaataatggatcagatgtagataaaaaagatacgtacggaaacacaccttttatcctattatgtaaacacgatatcaacaacgtggaattgtttgagatatgtttagagaatgctaatatagactctgtagactttaatagatatacacctcttcattatgtctcatgtcgtaataaatatgattttgtaaagttattaatttctaaaggagcaaatgttaatgcgcgtaataaattcggaactactccattttattgtggaattatacacggtatctcgcttataaaactatatttggaatcagacacagagttagaaatagataatgaacatatagttcgtcatttaataatttttgatgctgttgaatctttagattatctattatccagaggagttattgatattaactatcgtactatatacaacgaaacatctatttacgacgctgtcagttataatgcgtataatacgttggtctatctattaaacaaaaatggtgattttgagacgattactactagtggatgtacatgtatttcggaagcagtcgcaaacaacaacaaaataataatggaagtactattgtctaaacgaccatctttgaaaattatgatacagtctatgatagcaattactaaacataaacagcataatgcagatttattgaaaatgtgtataaaatatactgcgtgtatgaccgattatgatactcttatagatgtacagtcgctacagcaatataaatggtatattttaagatgtttcgatgaaatagatatcatgaagagatgttatataaaaaataaaactgtattccaattagttttttgtatcaaagacattaatactttaatgagatacggtaaacatccttctttcgtgaaatgcactagtctcgacgtatacggaagtcgtgtacgtaatatcatagcatctattagatatcgtcagagattaattagtctattatccaagaagctggatcctggagataaatggtcgtgttttcctaacgaaataaaatataaaatattggaaaactttaacgataacgaactatccacatatctaaaaatcttataaacattattaaaatataaaatctaagtaggataaaatcacactacatcattgtttccttttagtgctcgacagtgtatactatttttaacgctcataaataaaaatgaaaacgatttccgttgttacgttgttatgcgtactacctgctgttgtttattcaacatgtactgtacccactatgaataacgctaaattaacgtctaccgaaacatcgtttaatgataaccagaaagttacgtttacatgtgatcagggatatcattctttggatccaaatgctgtctgtgaaacagataaatggaaatacgaaaatccatgcaaaaaaatgtgcacagtttctgattatgtctctgaactatataataaaccgctatacgaagtgaattccaccatgacactaagttgcaacggcgaaacaaaatattttcgttgcgaagaaaaaaatggaaatacttcttggaatgatactgttacgtgtcctaatgcggaatgtcaacctcttcaattagaacacggatcgtgtcaaccagttaaagaaaaatactcatttggggaatatataactatcaactgtgatgttggatatgaggttattggtgcttcgtacataagttgtacagctaattcttggaatgttattccatcatgtcaacaaaaatgtgatatgccgtctctatctaatggattaatttccggatctacattttctatcggtggcgttatacatcttagttgtaaaagtggttttacactaacggggtctccatcatccacatgtatcgacggtaaatggaatcccgtactcccaacatgtgtacgatctaacgaaaaatttgatccagtggatgatggtcccgacgatgagacagatttgagcaaactctcgaaagacgttgtacaatatgaacaagaaatagaatcgttagaagcaacttatcatataatcatagtggcgttaacaattatgggcgtcatatttttgatctccgttatagtattagtttgttcctgtgacaaaaataatgaccaatataagttccataaattgctaccgtaaatataaatccgttaaaataattaataacgaacaagtatcaaaagattaaagacttatagctagaatcaattgagatgtcttcttcagtggatgttgatatctacgatgccgttagagcatttttactcaggcactattatgacaagagatttattgtgtatggaagaagtaacgccatattacataatatatacaggctatttacaagatgcgccgttataccgttcgatgatatagtacgtactatgccaaatgaatcacgtgttaaacaatgggtgatggatacacttaatggtataatgatgaatgaacgcgatattactgtatgtgtgggcaccggactacgattcatggaaatgtttttcgattacaataaaaatagtatcaacaatcaactaatgtatgatataattctagctaatgagagatatagaagcgcttttaacgacgatggtatatacatccgtagaaatatgattaacaagttgtacggatacgcatctctaactactattggcacgatcgctggaggtgtttgttattatctgttgatgcatctagttagtttgtataaataattatttcaatatactagttaaaattttaagattttaaatgtataaaaaactaataacgtttttatttgtaataggtgcattagcatcctattcgaataatgagtacactccgtttaataaactgagtgtaaaactctatatagatggagtagataatatagaaaattcatatactgatgataataatgaattggtgttaaattttaaagagtacacaatttctattattacagagtcatgcgacgtcggatttgattccatagatataaatgttataaacgactataaaattattgatatgtataccattgactcgtctactattcaacgcagaggtcacacgtgtagaatatctaccaaattatcatgccattatgataagtacccttatattcacaaatatgatggtgatgagcgacaatattctattactgcagagggaaaatgctataaaggaataaaatatgaaataagtatgatcaacgatgatactctattgagaaaacatactcttaaaattggatctacttatatatttgatcgtcatggacatagtaatacatattattcaaaatatgatttttaaaaatttaaaatatattatcacttcagtgacagtagtcaaataacaaacaacaccatgagatatattataattctcgcagttttgttcattaatagtatacatgctaaaataactagttataagtttgaatccgtcaattttgattccaaaattgaatggactggggatggtctatacaatatatcccttaaaaattatggcatcaagacgtggcaaacaatgtatacaaatgtaccagaaggaacatacgacatatccgcatttccaaagaatgatttcgtatctttctgggttaaatttgaacaaggcgattataaagtggaagagtattgtacgggactatgcgtcgaagtaaaaattggaccaccgactgtaacattgactgaatacgacgaccatatcaatttgtacatcgagcatccgtatgctactagaggtagcaaaaagattcctatttacaaacgcggtgacatgtgtgatatctacttgttgtatacggctaacttcacattcggagattctaaagaaccagtaccatatgatatcgatgactacgattgcacgtctacaggttgcagcatagactttgtcacaacagaaaaagtgtgcgtgacagcacagggagccacagaaaggtttctcgaaaaaattactccatggagttcgaaagtatgtctgacacctaaaaagagtgtatatacatgcgcaattagatccaaagaagatgttcccaatttcaaggacaaaatggccagagttatcaagagaaaatttaatacacagtctcaatcttatttaactaaatttctcggtagcacatcaaatgatgttaccacttttcttagcatgcttaacttgactaaatattcataactaatttttattaatgatacaaaaacgaaataaaactgcatattatacactggttaacgcccttataggctctaaccattttcaagatgaggtccctgattatagtccttctgttcccctctatcatctactccatgtctattagacaatgtgagaagactgaagaggaaacatggggattgaaaatagggttgtgtataattgccaaagatttctatcccgaaagaactgattgcagtgttcatctcccaactgcaagtgaaggattgataactgaaggcaatggattcagggatatacgaaacaccgataaattataaaaaaagcaatgtgtccgctgtttccgttaataatactattttcgtaactggcggattattcataaataactctaatagcacgatcgtggttaacaatatggaaaaacttgacatttataaagacaaacaatggtcgattatagaaatgcctatggctagggtatatcacggcatcgactcgacatttggaatgttatattttgccggaggtctatccgttaccgaacaatatggtaatttagagaaaaacaacgagatatcttgttacaatcctagaacgaataagtggtttgatatttcatatactatttataagatatccatatcatcattgtgtaaactaaataacgtcttctatgtatttagtaaggacattggatatgtggaaaagtatgatggtgcatggaagttagtacatgatcgtctccccgctataaaggcattatcaacttctccttattgattgaaaatgaaaatataaatagtttttatgtatagcagtattaccctatagttttattgcttactactaacatggatacagatgttacaaatgtagaagatatcataaatgaaatagatagagagaaagaagaaatactaaaaaatgtagaaattgaaaataataaaaacattaacaagaatcatcccaatgaatatattagagaagcactcgttattaataccagtagtaatagtgattccattgataaagaagttatagaatgtatcagtcacgatgtaggaatatagatcatatctactaatttttataatcgatacaaaacataaaaaacaactcgttattacatagcaggcatggaatccttcaagtattgttttgataacgatggcaagaaatggattatcggaaatactttatattctggtaattcaatactctataaggtcagaaaaaatttcactagttcgttctacaattacgtaatgaagatagatcacaaatcacacaagccattgttgtctgaaatacgattctatatatctgtattggatcctttgactatcgacaactggacacgggaacgtggtataaagtatttggctattccagatctgtatggaattggagaaaccgatgattatatgttcttcgttataaagaattcgggaagagtattcgccccaaaggatactgaatcagtcttcgaagcatgcgtcactatgataaacacgttagagtttatacactctcgaggatttacccatggaaaaatagaaccgaggaatatactgattagaaataaacgtctttcactaattgactattctagaactaacaaactatacaagagtggaaactcacatatagattacaacgaggacatgataacttcaggaaatatcaattatatgtgtgtagacaatcatcttggagcaacagtttcaagacgaggagatttagaaatgttgggatattgcatgatagaatggttcggtggcaaacttccatggaaaaacgaaagtagtataaaagtaataaaacaaaaaaaagaatataaaaaatttatagctactttctttgaggactgttttcctgaaggaaatgaacctctggaattagttagatatatagaattagtatacacgttagattattctcaaactcctaattatgacagactacgtagactgtttatacaagattgaaattatattcttttttttatagagtgtggtagtgttacggatatctaatattaatattagactatctctatcgcgctacacgaccaatatcgattactatggatatcttctatgaaaggagagaatgtattcatttctccagcgtcaatctcgtcagtattgacaatactgtattatggagctaatggatccactgctgaacagctatcaaaatatgtagaaacggaggagaacacggataaggttagcgctcagaatatctcattcaaatccatgaataaagtatatgggcgatattctgccgtgtttaaagattcctttttgagaaaaattggcgataagtttcaaactgttgacttcactgattgtcgcactatagatgcaatcaacaagtgtgtagatatctttactgaggggaaaatcaatccactattggatgaaccattgtctcctagcaattagtgccgtatactttaaagcaaaatggttgacgccattcgaaaaggaatttaccagtgattatcccttttacgtatctccgacggaaatggtagacgtaagtatgatgtctatgtacggcgagctatttaatcacgcatctgtaaaagaatcattcggcaacttttcaatcatagaactgccatatgttggagatactagtatgatggtcattcttccagacaagattgatggattagaatccatagaacaaaatctaacagatacaaattttaagaaatggtgtgactttatggatgctatgtttatagatgttcacattcccaagtttaaggtaacaggttcgtataatctggtggatactctagtaaagtcaggactgacagaggtgttcggttcaactggagattatagcaatatgtgtaatttagatgtgagtgtcgacgctatgatccacaaaacgtatatagatgtcaatgaagagtatacagaagcagctgcagcaacttctgtactagtggcagactgtgcatcaacagttacaaatgagttctgtgcagatcatccgttcatctatgtgattaggcatgttgatggcaaaattcttttcgttggtagatattgctctccaacaactaattgttaaccattttttttaaaaaaaatagaaaaaacatgtggtattagtgcaggtcgttgttcttccaattgcaattggtaagatgacggccaactttagtacccacgtcttttcaccacagcactgtggatgtgacagactgaccagtattgatgacgtcaaacaatgtttgactgaatatatttattggtcgtcctatgcataccgcaacaggcaatgcgctggacaattgtattccacactcctctcttttagagatgatgcggaattagtgttcatcgacattcgcgagctggtaaaaaatatgccgtgggatgatgtcaaagattgtgcagaaatcatccgttgttatataccggatgagcaaaaaaccatcagagagatttcggccatcatcggactttgtgcatatgctgctacttactggggaggtgaagaccatcccactagtaacagtctgaacgcattgtttgtgatgcttgagatgctaaattacgtggattataacatcatattccggcgtatgaattgatgagttgtacatcttgacattttctttcttctcttctccctcttctccctttcccagaaacaaactttttttacccactataaaataaaatgagtatactacctattatatttcttcctatatttttttattcttcattcgttcagacttttaacgcgcctgaatgtatcgacaaagggcaatattttgcatcattcatggagttagaaaacgagccagtaatcttaccatgtcctcaaataaatacgctatcatccggatataatatattagatattttatgggaaaaacgaggagcggataatgatagaattataccgatagataatggtagcaatatgctaattctgaacccgacacaatcagactctggtatttatatatgcattaccacgaacgaaacctactgtgacatgatgtcgttaaatttgacaatcgtgtctgtctcagaatcaaatatagatcttatctcgtatccacaaatagtaaatgagagatctactggcgaaatggtatgtcccaatattaatgcatttattgctagtaacgtaaacgcagatattatatggagcggacatcgacgccttagaaataagagacttaaacaacggacacctggaattattaccatagaagatgttagaaaaaatgatgctggttattatacatgtgttttagaatatatatacagaggtaaaacatataacgtaaccagaattgtaaaattagaggtacgggataaaataataccttctactatgcaattaccagatggcattgtaacttcaataggtagtaatttgactattgcatgcagagtatcgttgagacctcccacaacggacaccgacgtcttttggataagtaatggtatgtattacgaagaagatgatggggacggaaacggtagaataagtgtagcaaataaaatctatatgaccgataagagacgtgttattacatcccggttaaacattaatcctgtcaaggaagaagatgctacaacgtttacgtgtatggcgtttactattcctagcatcagcaaaacagttactgttagtataacgtgaatgtatgttgttacatttccatgtcaattgagtttataagaatttttatacattatcttccaacaagcaattgacgaacgtattgctatgattaactcccacgatactatgcatattattaatcattaacttgcagactatacctagagctattttgacatactcgtgttcttgtgtaattgcagtatctatattattaaagtacgtaaatctagctatagttttattatttaattttagataatataccgtctccttatttttaaaaattgttacatcctttattaaatcatgaatgggaatttctatgtcatcgttagtatattgtgaacaacaagagcagatatctataggaaagggtggaatgcgatacattgatctatgtagttttaaaacacacgcaaactttgaagaatttatataaatcattccatcgatacatccttctatgttgagatgtatatatccaggaattcgtttattaatatcgggaaatgtataaactaaaacattgcccgaaagcggtgcctctatctgcgttatatccgttcttaacttacaaaatgtaaccaatacctttgcatgacttgttttgttcggcaacgttagtttaaacttgacgaatggattaattacaatagcatgatccgcgcatctattaagtttttttactttaacgcccttgtatgtttttacagagactttatctaaatttctagtgcttgtatgtgttataaatataacgggatatagaaccgaatcacctaccttagatacccaattacattttatcagatccagataataaacaaattttgtcgccctaactaattctatattgttatatattttacaattggttatgatatcatgtaataacttggagtctaacgcgcatcgtcgtacgtttatacaattgtgatttagtgtagtatatctacacatgtatttttccgcactatagtattctggactagtgataaaactatcgttatatctgtcttcaatgaactcatcgagatattgctctctgtcatattcatacacctgcataaactttctagacatcttacaatccgtgttattttaggatcatatttacatatttacgggtatatcaaagatgttagattagttaatgggaatcgtctataataatgaatattaaacaattatatgaggacttttaccacaaagcatcataaaaatgagtcgtcgtctgatttatgttttaaatatcaaccgcgaatcaactcataaaatacaagagaatgaaatatatacatattttagtcattgcaatatagaccatacttctacagaacttgattttgtagttaaaaactatgatctaaacagacgacaacctgtaactgggtatactgcactacactgctatttgtataataattactttacaaacgatgtactgaagatattattaaatcatggagtggatgtaacgatgaaaaccagtagcggacgtatgcctgtttatatattgcttactagatgttgcaatatttcacatgatgtagtgatagatatgatagacaaagataaaaaccacttatcgcatagagactattccaacctactactagagtatataaaatctcgttacatgttattgaaggaagaggatatcgatgagaacatagtatccactttattagataagggaatcgatcctaactttaaacaagacggatatacagcgttacattattattatttgtgtctcgcacacgtttataaaccaggtgagtgtagaaaaccgataacgataaaaaaggccaagcgaattatttctttgtttatacaacatggagctaatctaaacgcgttagataattgtggtaatacaccattccatttgtatcttagtattgaaatgtgtaataatattcatatgactaaaatgctgttgacttttaatccgaatttcgaaatatgtaataatcatggattaacgcctatactatgttatataacttccgactacatacaacacgatattcttgttatgttaatacatcactatgaaacaaatgttggagaaatgccgatagatgagcgtcgtatgatcgtattcgagtttatcaaaacatattctacacgtccggcagattcgataacttatttgatgaataggtttaaaaatataaatatttatacccgctatgaaggaaagacattattacacgtagcatgtgaatataataatacacaagtaatagattatcttatacgtatcaacggagatataaatgcgttaaccgacaataacaaacacgctacacaactcattatagataacaaagaaaattccccatataccattaattgtttactgtatatacttagatatattgtagataagaatgtgataagatcgttggtggatcaacttccatctctacctatctttcgtcgcttatcatactagtcatatcctaaatgttgatcatattccaccaaatgattgtgaaagagattgagattaaatcgtctaacaaacaattagtttttatgacattaacatataataaataaattaatcattattgacttaacgatgacgaaagttatcatcatcttaggattcttgattattaatacaaattcattgtctatgaaatgtgaacaaggtgtctcatattataattcacaagaattaaagtgttgtaaactatgtaagccaggaacatattcagatcatcgatgtgataaatacagcgataccatttgtggacattgtccgagtgacacattcacgtcaatatataatcgttctccttggtgtcatagttgtagaggtccatgtggtactaatcgagtagaggtcacaccttgtacacctaccacaaatagaatctgtcattgtgactcgaatagttattgtctccttaaagcttctgatggtaactgtgttacatgtgctcctaaaacaaaatgtggtcgtgggtatggaaagaaaggagaagatgaaatgggtaataccatttgtaagaaatgtcggaagggtacttattcagatattgtatctgactctgatcaatgtaaaccaatgacaagataagacttactcgcatctactggatagacataaaatatcctcctcgtaataatgaaatataaatatacactaattattaatatcaataacaatcgagtattaatatataggtcatttttaaatcccttttgggttccgtcccaaacggcgtttcggtctgcgtcgccgccatggccatgccgagcctctccgcgtgctcctccatcgaggacgacttcaactatggcagctcggtggcgtctgccagcgtgcacatacgaatggcatttctaagaaaagtctacggtatcctttgtctacaatttcttttaacaacggcaacaactgcagtatttttatactttgactgcatgcggacatttatacaagggagtcctgttctaatattggcatcaatgttcggatctataggcttgattttcgcattgactttacacagacataaacatcccctgaatctgtacctgctttgtggatttacactgtcggaatctctaacgctggcctctgttgttactttctatgatgtgcatgtcgttatgcaagctttcatgctgactactgcagcgtttcttgctctgactacatatactctacaatcaaagagagatttcagtaaacttggagcaggattgtttgctgctttgtggattttaattttgtcaggactcttggggatatttgtgcaaaatgagacagtgaagctggtcctgtctgcttttggggcccttgtattctgtggattcattatctatgacacgcactcactaatacataagctctcgcctgaagagtatgtgttagcctctatcaatctctacttggatatcatcaatctgttcttgcatctgttgcagcttttggaagtatctaataagaaataaagtttaaaatagaattaataaaaacatataggtcattttttaaacatggattggaaaccaaggtagttagttaatacacacaagatatatttttttcacatcatccacccatgggtaacaccaaggttgttagttaataatatacaagatattttttctcactctgatccatgtaaaccaaggacgagataagacactctcattcctcatccacaaccccattaaaaaaatggaaattaaagccctctattagcataaacggctacaggtctaccatcaggttaaccttcgtctaccttcacaatggcctctccttgtgcccagttcagaccctgtcattgccactccctgaataccgtggccgacgtcagacattgtctgactgaatacatcctgtgggtttctcatagatggacccatagagaaactgcagggcctctctacaggcttctcatctctttcagaactgatgcaacggagctctttggtggtgagttgaaggagttctcggattcacttccgtgggacaatatcgacaattgcgtggagatcattaaatgtttcatcagaaatgactccatgaaaaccgccgaagaacttcgtgcaatcattggactttgtactcaatcagctatcgtctctggaagagtcttcaacgataagtatatcgacatactacttatgctgcgaaagattctgaacgagaacgactatctcaccctcttggatcatatccgcactgctaaatactaaatctccttcatgctctctcactacactttttatcatcttatgaggaatgattgccttcgtgaaataggaataattagcaccagaatagctatggattgcacatgtattctatgtcgtctactggatgaagatgtgacgtacaaaaaaataaaactagaaattgaaacgtgtcacaacttatcaaaacatatagatagacgaggaaacaatgcgctacattgttacgtctccaataaatgcgatacagacattaagattgttctctcgcggagtcgagagactttgtagaaacaacgaaggattaactccgctaggagcatacagtaagcatagatacgtaaaatctcagattgtgcatctactgatatccagctattcaaattcctctaacgaactcaagtcgaatataaatgatttcgatctgtattcgtataatatcgacttacgtctgctaaaatacctaattgtggataaacggatacgtccgtccaagaatacgaattatgcaatcaatggtctcggattggtggatatatacgtaacgacgcctaatccgagaccagaagtattgctatggcttcttaaatcagaatgttacagcaccggttacgtatttcgtacctgtatgtacgacagtgatatgtgtaagaactctcttcattactatatatcgtctcatagagaatctcaatctctatccaaggatgtaattaaatgtttgatcaataacaatgtttccatccatggcagagacgaaggaggatctttacccatccaatactactggtctttctcaaccatagatatagagattgttaaattattattaataaaggatgtggacacgtgtagagtatacgacgtcagccctatattagaggcgtattatctaaacaagcgatttagagtaaccccatataatgtagacatggaaatcgttaatcttcttattgagagacgtcatactcttgtcgacgtaatgcgtagtattacttcgtacgattccagagaatataaccactacatcatcgataacattctaaagagatttagacaacaggatgtacaagccatgttgataaactacttacattacggcgatatggtaagtatacctatcattcaatgcatgttagataacggagcaaccatggataagacgacggacaacaactatcctctacacgactactttgttaataataatctcgtcgatgtaaacgtcgtaaggtttatcgtggaaaatatggacacgcggctgtaaatcacatatcgaacaatggccgtctatgtatgtacggtctgatattatcgagatttaataattgcgggtatcactgttatgaaaccatactgatagatgtatttgatatactaagcaagtacatggatgatatagatatgatcgataactctactatattacgcggtcgatgtcaataatatacaatttgcaaagcggttattggaatatggagcgagtgtcacaacatcacgctcgataatcaatacggccatccagaaaagcagttaccaaagagaaaacaaaacgaggatagttgatttattactgagttaccatcccactctagagactatgattgacgcatttaatagagatatacgctatctatatcctgaaccattatcggcatgtatcagatacgccttaatcctagatgatgattttccttctaaagtaaagtatgatatcgccggtcgtcataaggaactaaagcgctatagagtagacattaatagaatgaagaatgcctacatatcaggcgtctccatgtttgatatattatttaaacgaagcaaacgccacagattgagatacgcaaagaatccgacatcaaatggtacaaaaaagaactaacgtccatcattacagaaactgtaaagaacaatgagaggatcgactccatagtggacaacattaatacagacgataacttgatttcgaaattacccatggagatactttattactccattaaataatttatcatggagcgataatgtcctgtttcatttgtttccatgacatattacaaaatcgattccgtccaagatgataaaaacatttaccggcatcataaacacggagtttattttatatgtctcgcataaacattactaaaaaaatatattgttcggttttctttcacatctttaattatgaaaaagtaaatcattatgagatggacgagattgtacgcatcgttcgcgacagtatgtggtacatacctaacgtatttatggacgacggtaagaatgaaggtcacgtttctgtcaacaatgtctgtcatatgtattttacgttctttgatgtggatacatcgtctcatctgtttaagctagttattaaacactgcgatctgaataaacgaggtaactctccattacattgctatacgatgaatacacgatttaatccatctgtattaaagatattgttacaccacggcatgcgtaactttgatagcaaggatgaccactatcaatcgataacaagatctttgatatactaacggacaccattgatgactttagtaaatcatccgatctattgctgtgttatcttagatataaattcaatgggagcttaaactattacgttctgtacaaaggatccgaccctaattgcgccgacgaggatgaactcacttctcttcattactactgtaaacacatatccacgttctacgaaagcaattattacaagttaagtcacactaagatgcgagccgagaagcgattcatctacgcgataatagattatggagcaaacattaacgcggttacacacttaccttcaacagtataccaaacatagtcctcgtgtggtgtatgctcttttatctcgaggagccgatacgaggatacgtaataatcttgattgtacacccatcatggaacgattgtgcaacaggtcatattctcataatgttactcaattggcacgaacaaaaggaagaaggacaacatctactttatctattcataaaacataatcaaggatacactctcaatatactacggtatctattagataggttcgacattcagaaagacgaatactataataccgcctttcaaaattgtaacaacaatgttgcctcatacatcggatacgacatcaaccttccgactaaagacggtattcgacttggtgtttgaaaacagaaacatcatatacaaggcggatgttgtgaatgacatcatccaccacagactgaaagtatctctacctatgattaaatcgttgttctacaagatgtctctccctacgacgattactacgtaaaaaagatactagcctactgcctattaagggacgagtcattcgcggaactacatagtaaattctgtttaaacgaggactataaaagtgtatttatgaaaaatatatcattcgataagatagattccatcatcgtgacataagtcgcctcaaagagattcgaatctccgacaccgacctgtatacggtatcacagctatcttaaagccatacattcagacagtcacatttcatttcccatgtacgacgatctcatagaacagtgccatctatcgaaactcgtcgacaaagcactcaataaattagagtctaccatcgatggccaatctagactatcgtatttgcctccggaaattatgcgcaatatcatctaaacagtatgttgtacggaaagaaccattacaaatattatccatgattggagaagtaggaaacaggaacaagacaacgattactacattattaaattatgaagtccgtattatactcgtatatattgtttctctcatgtataataataaacggaagagatatagcaccgcatgcaccatccgatggaaagtgtaaagacaacgaatacaaacgccataatctgtgtccgggaacatacgcttccagattatgcgatagcaagactaacacacgatgtacgccgtgtggttcgggtaccttcacatctcgcaataatcatttacccgcttgtctaagttgtaacggaagacgcgatcgtgtaacacgactcacaatagaatctgtgaatgctctcccggatattattgtcttctcaaaggatcatccggatgcaaggcatgtgtttcccaaacaaaatgtggaataggatacggagtatccggagacgtcatctgttctccgtgtggtctcggaacatattctcacaccgtctcttccgcagataaatgcgaacccgtacccagaaatacgtttaactatatcgatgtggaaattaacctgtatccagttaacgacacgtcgtgtactcggacgaccactaccggtctcagcgaatccatctcaacgtcggaactaactattactatgaatcataaagactgtaatcccgtatttcgtgatggatacttctccgttcttaataaggtagcgacttcaggtttctttacaggagaaaggtgtgcactctgaatttcgagattaaatgcaataacaaagattcttcctccaaacagttaacgaaagcaaagaatgatactatcatgccgcattcggagacagtaactctagtgggcgacatctatatactatatagtaataccaatactcaagactacgaaactgatacaatctcttatcatgtgggtaatgttctcgatgtcgatagccatatgcccggtagttgcgatatacataaactgatcactaattccaaacccacccactttttatagtaagtttttcacccataaataataaatacaataattaatttctcgtaaaagtagaaaatatattctaatttattgcacggtaaggaagtagaatcataaagaacagtactcaatcaatagcaattatgaaacaatatatcgtactggcatgcatgtgcctggcggcagctgctatgcctgccagtcttcagcaatcatcctcatcctcctcctcgtgtacggaagaagaaaacaaacatcatatgggaatcgatgttattatcaaagtcacaaagcaagaccaaacaccgaccaatgataagatttgccaatccgtaacggaaattacagagtccgagtcagatccagatcccgaggtggaatcagaagatgattccacatcagtcgaggatgtagatcctcctaccacttattactccatcatcggtggaggtctgagaatgaactttggattcaccaaatgtcctcagattaaatccatctcagaatccgctgatggaaacacagtgaatgctagattgtccagcgtgtccccaggacaaggtaaggactctcccgcgatcactcatgaagaagctcttgctatgatcaaagactgtgaagtgtctatcgacatcagatgtagcgaagaagagaaagacagcgacatcaagacccatccagtactcgggtctaacatctctcataagaaagtgagttacgaagatatcatcggttcaacgatcgtcgatacaaaatgcgtcaagaatctagagtttagcgttcgtatcggagacatgtgcaaggaatcatctgaacttgaggtcaaggatggattcaagtatgtcgacggatcggcatctgaaggtgcaaccgatgatacttcactcatcgattcaacaaaactcaaagcgtgtgtctgaatcgataactctattcatctgaaattggatgagtagggttaatcgaacgattcaggcacaccacgaattaaaaaagtgtaccggacactatattccggtttgcaaaacaaaaatgttcttaactacattcacaaaaagttacctctcgcgacttcttctttttctgtctcaatagtgtgatacgattatgacactattcctattcctattcctatttcctttcagagtatcacaaaaatattaaacctctttctgatggtctcataaaaaaagttttacaaaaatatttttattctctttctctctttgatggtctcataaaaaaagttttacaaaaatatttttattctctttctctctttgatggtctcataaaaaaagttttacaaaaatatttttattctctttctctctttgatggtctcataaaaaaagttttacaaaaatatttttattctctttctctctttgatggtctcataaaaaaagttttacaaaaatatttttattctctttctctctttgatggtctcataaaaaaagttttacaaaaatatttttattctctttctctctttgatggtctcataaaaaaagttttacaaaaatatttttattctctttctctctttgatggtctcataaaaaaagttttacaaaaatatttttattctctttctctctttgatggtctcataaaaaaagttttacaaaaatatttttattctctttct

SEQ ID NO: 39 - DNA, 188863 bp, Artificial Sequence
  LIVP 5.1.1
cgattaaaactttttttatgagaccatcaaagagagaaagagaataaaaatatttttgtaaaactttttttatgagaccatcaaagagagaaagagaataaaaatatttttgtaaaactttttttatgagaccatcaaagagagaaagagaataaaaatatttttgtaaaactttttttatgagaccatcaaagagagaaagagaataaaaatatttttgtaaaactttttttatgagaccatcaaagagagaaagagaataaaaatatttttgtaaaactttttttatgagaccatcaaagagagaaagagaataaaaatatttttgtaaaactttttttatgagaccatcaaagagagaaagagaataaaaatatttttgtaaaactttttttatgagaccatcaaagagagaaagagaataaaaatatttttgtaaaactttttttatgagaccatcaaagagagaaagagaataaaaatatttttgtaaaactttttttatgagaccatcaaagagagaaagagaataaaaatatttttgtaaaactttttttatgagaccatcaaagagagaaagagaataaaaatatttttgtaaaactttttttatgagaccatcaaagagagaaagagaataaaaatatttttgtaaaactttttttatgagaccatcaaagagagaaagagaataaaaatatttttgtaaaactttttttatgagaccatcaaagagagaaagagaataaaaatatttttgtaaaactttttttatgagaccatcaaagagagaaagagaataaaaatatttttgtaaaactttttttatgagaccatcaaagagagaaagagaataaaaatatttttgtaaaactttttttatgagaccatcaaagagagaaagagaataaaaatatttttgtaaaactttttttatgagaccatcaaagagagaaagagaataaaaatatttttgtaaaactttttttatgagaccatcagaaagaggtttaatatttttgtgatactctgaaaggaaataggaataggaataggaatagtgtcataatcgtatcacactattgagacagaaaaagaagaagtcgcgagaggtaactttttgtgaatgtagttaagaacatttttgttttgcaaaccggaatatagtgtccggtacacttttttaattcgtggtgtgcctgaatcgttcgattaaccctactcatccaatttcagatgaatagagttatcgattcagacacacgctttgagttttgttgaatcgatgagtgaagtatcatcggttgcaccttcagatgccgatccgtcgacatacttgaatccatccttgacctcaagttcagatgattccttgcacatgtctccgatacgaacgctaaactctagattcttgacgcattttgtatcgacgatcgttgaaccgatgatatcttcgtaactcactttcttatgagagatgttagacccgagtactggatgggtcttgatgtcgctgtctttctcttcttcgctacatctgatgtcgatagacacttcacagtctttgatcatagcaagagcttcttcatgagtgatcgcgggagagtccttaccttgtcctggggacacgctggacaatctagcattcactgtgtttccatcagcggattctgagatggatttaatctgaggacatttggtgaatccaaagttcattctcagacctccaccgatgatggagtaataagtggtaggaggatctacatcctcgactgatgtggaatcatcttctgattccacctcgggatctggatctgactcggactctgtaatttccgttacggattggcaaatcttatcattggtcggtgtttggtcttgctttgtgactttgataataacatcgattcccatatgatgtttgttttcttcttccgtacacgaggaggaggatgaggatgattgctgaagactggcaggcatagcagctgccgccaggcacatgcatgccaggacgatatattgtttcataattgctattgattgagtactgttctttatgattctacttccttaccgtgcaataaattagaatatattttctacttttacgagaaattaattattgtatttattatttatgggtgaaaaacttactataaaaagtgggtgggtttggaattagtgatcagtttatgtatatcgcaactaccgggcatatggctatcgacatcgagaacattacccacatgataagagattgtatcagtttcgtagtcttgagtattggtattactatatagtatatagatgtcgcccactagagttactgtctccgaatgcggcatgatagtatcattctttgctttcgttaactgtttggaggaagaatctttgttattgcatttaatctcgaaattcagagtgcacacctttctcctgtaaagaatcctgaagttgctaccttattaagaacggagaagtatccatcacgaaagacgggattacagtctttatgattcatagtaatagttagttccgacgttgagatggattcgctgagaccggtagtggtcgtccgagtacacgacgtgtcgttaactggatacaggttaatttccacatcgatatagttaaacgtatttctgggtacgggttcgcatttatctgcggaagagacggtgtgagaatatgttccgagaccacacggagaacagatgacgtctccggatactccgtatcctattccacattttgtttgggaaacacatgccttgcatccggatgatcctttgagaagacaataatatccgggagagcattcacagattctattgtgagtcgtgttacacgatcgcgtcttccgttacaacttagacaagcgggtaaatgattattgcgagatgtgaaggtacccgaaccacacggcgtacatcgtgtgttagtcttgctatcgcataatctggaagcgtatgttcccggacacaaattatggcgtttgtattcgttgtctttacactttccatcggatggtgcatgcggtgctatatctcttccgtttattattatacatgagagaaacaatatatacgagtataatacggacttcatgatttaataatgtagtaatcgttgtcttgttcctgtttcctacttctccaatcatatagatattttctttctatcatggataatatttgtaatggttctttccgtacaacatactgtttagatgatattgcgcataatttccggaggcaaatacgatagtctagattgaccgatggtagactctaatttattgagtgctttgtcgacgagtttacttttacgctccatcgatagatggcactgttctatgagatcgtcgtacatgggaaatgaaatgtgactgtctgaatgtatggctttaagatagctgtgataccgtatacaggtcggtgtcggagattcgaatctctttgaggcgacttatgtcacgatgatggaatctatcttatcgaatgatatatttttcataaatacacttttatagtcctcgtttaaacagaatttactatgtagttccgcgaatgactcgtcccttaataggcagtaggctagtatcttttttacgtagtaatcgtcgtagggagagacatcttgtagaacaacgatttaatcataggtagagatactttcagtctgtggtggatgatgtcattcacaacatccgccttgtatatgatgtttctgttttcaaacaccaagtcgaataccgtctttagtcggaaggttgatgtcgtatccgatgtatgaggcaacattgttgttacaattttgaaaggcggtattatagtattcgtctttctgaatgtcgaacctatctaatagataccgtagtatattgagagtgtatccttgattatgttttatgaatagataaagtagatgttgtccttcttccttttgttcgtgccaattgagtaacattatgagaatatgacctgttgcacaatcgttccatgatgggtgtacaatcaagattattacgtatcctcgtatcggctcctcgagataaaagagcatacaccacacgaggactatgtttggtatactgttgaaggtaagtgtgtaaccgcgttaatgtttgctccataatctattatcgcgtagatgaatcgcttctcggctcgcatcttagtgtgacttaacttgtaataattgctttcgtagaacgtggatatgtgtttacagtagtaatgaagagaagtgagttcatcctcgtcggcgcaattagggtcggatcctttgtacagaacgtaatagtttaagctcccattgaatttatatctaagataacacagcaatagatcggatgatttactaaagtcatcaatggtgtccgttagtatatcaaagatcttgttatcgattgatagtggtcatccttgctatcaaagttacgcatgccgtggtgtaacaatatctttaatacagatggattaaatcgtgtattcatcgtatagcaatgtaatggagagttacctcgtttattcagatcgcagtgtttaataactagcttaaacagatgagacgatgtatccacatcaaagaacgtaaaatacatatgacagacattgttgacagaaacgtgaccttcattcttaccgtcgtccataaatacgttaggtatgtaccacatactgtcgcgaacgatgcgtacaatctcgtccatctcataatgatttactttttcataattaaagatgtgaaagaaaaacagaacaatatatttttttagtaatgtttatgcgagacatataaaataaactccgtgtttatgatgccggtaaatgtttttatcatcttggacggaatcgattttgtaatatgtcatggaaacaaatgaaacaggacattatcgctccatgataaattatttaatggagtaataaagtatctccatgggtaatttcgaaatcaagttatcgtctgtattaatgttgtccactatggagtcgatcctctcattgttctttacagtttctgtaatgatggacgttagttcttttttgtaccatttgatgtcggattctttgcgtatctcaatttgtggcgtttgcttcgtttaaagaatatatcaaacatggagacgcctgatatgtagacattcttcattctattaatgtctactctatagcgctttagttccttatgacgaccggagatatcatactttactttagaaggaaaatcatcatctaggattaaggcgtatctgatacaggcgaataatggttcaggatatagatagcgtatatctctattaaatgcgtcaatcatagtctctagagtgggatggtagctaagtaataaatcaactatcctcgttttgttttctctttggtaactgcttttctggatggccgtattgattatcgagcgtgacactcgctccatattccaataaccgctttgcaaattgtatattattgacatcgaccgcgtaatatagtagagttatcgatcatatctatatcatccatgtacttgcttagtatatcaaatacatctatcagtatggtttcataacagtgatacccgcaattattaaatctcgataatatcagaccgtacatacatagacggccattgttagatatgtgatttacagccgcgtgtccatattttccacgataaaccttacgacgtttacatcgacgagattattattaacaaagtagtcgtgtagaggatagttgttgtccgtcgtcttatccatggttgctccgttatccaacatgcattgaatgataggtatacttaccatatcgccgtaatgtaagtagtttatcaacatggcttgtacatcctgttgtctaaatctctttagaatgttatcgatgatgtagtggttatattctctggaatcgtacgaagtaatactacgcattacgtcgacaagagtatgacgtctctcaataagaagattaacgatttccatgtctacattatatggggttactctaaatcgcttgtttagataatacgcctctaatatagggctgacgtcgtatactctacacgtgtccacatcctttattaataatttaacaatctctatatctatggttgagcaagaccagtagtattggatgggtaaagatcctccttcgtctctgccatggatggaaacattgttatcgatcaaacatttaattacatccttggatagagattgagattctctatgagacgatatatagtaatgaagagagttcttacacatatcactgtcgtacatacaggtacgaaatacgtaaccggtgctgtaacattctgatttaagaagccatagcaatacttctggtctcggattaggcgtcgttacgtatatatccaccaatccgagaccattgattgcataattcgtattcttggacggacgtatccgtttatccacaattaggtattttagcagacgtaagtcgatattatccgaatacagatcgaaatcatttatattcgacttgagttcgttagaggaattcgaatagctggatatcagtagatgcacaatctgagatttgacgtatctatgcttactgtatgctcctagcggagttaatccttcgttgtttctacaaagtctctcgactccgcgagagagtaacagccgaacaatcttaatgtctgtatcgcatttattgaagacgtaacaatgtagcgcattgtttcctcgtctatctatatgttttgataagttgtgacacgtttcaatctctggttttatttttttgtacgtcacatcttcatccagtagacgacatagaatagtgcactctctaccacaataatccatagctattctggtgctaattattcctatttcacgaaggcaatcattcctcataagatgataaaaagtgtagtgagagagcatgaaggagatttagtatttagcagtgcggatatgatccaagagggtgagatagtcgttctcgttcagaatctttcgcagcataagtagtatgtcgatatacttatcgttgaagactctttataaaagtctatttgtttatatttattgcggatagcagtatttccctataaaaagtatacgtcctgtggtgtctttaatcatgtacatgaatggatggtttatgtagaccttcgtacgatataccatcgaaaagttaatcgtaaatactcctgtaacggccgatgcttctgtatactcctcattaacatctataaacgtcgtatgtagaaatttttctacagtgatagtttcattacacatcttgctaaaatctgcataatatccgaatatattagtaagtcctaaattttctaaaatcggtaccagattatacggttctgtcatttccactttaaactttggcatatacaagtctatacttttagtagataacataccacaccattttttaaatttttcatctgttatatttttttctatgttatatataccttctatgtcgtccggtagtataattaccatactagagtttccctcgtatggaatatcgataatagagaatcctccgaataattcattaatatgtacatattgcaagttattctcggtacccaccatcatatcaacgctggtaactatattcttagaaatataaaacttgtctgtatatgtaagatgtttagaaaatggatatttccacattgctttaaaatggacggcgctaacaactgtcatacgagtattaatggatagcggactagtcaataaggaattaattttaccatttgtcattgtcttaacccattcgttgattagttcctttgtttggttagcattattaaagtttacagtttgaaaatcgtcttttattttttgtaggaaggaggcgtggaactcgatactatcgctaccgtatattttatttgcggtagctagtgtcgcacaatacggaatatctacctccatgtcatcattattgtcatcgggtgtattctcattcatattctctatatattttgatagttgttcagctgtagaaccagctgctccatgatttagaatagataaagtagataaaatggaaactggagaaatcaaaacattttcatcagggtgttttaagattagttctttaaagatatccatggtatagacctaacgataacgatatatatcataaataaataatgttaaatttcaatttatgtttgtaccccgtattcatacttaacaaattggtattgcgtacacaatcaatcatattacataccattaataatgcaagcataaaaaattgttagtagatgtttctaaatataggttccgtaagcaaagaatataagaatgaagcggtaatgataaaatcaatcgttatctaaaatgatcatactcatttattttattctattatattaacacatacatttttaacagcaacacattcaatattgtattgttatttttatattatttacacaattaacaatatattattagtttatattactgaattaataatataaaattcccaatcttgtcataaacacacactgagaaacagcataaacacagaatccatcaaaaatgttgataaattatctgatgttgttgttcgctgctatgataatcagatcattcgccgatagtggtaacgctatcgaaacgacattgccagaaattacaaacgctacaacagatattccagctatcagattatgcggtccagagggagatggatattgtttacacggtgactgtatccacgctagagatattgacggtatgtattgtagatgctctcatggttatacaggcattagatgtcagcatgtagtattagtagactatcaacgttcagaaaacccaaacactacaacgtcatatatcccatctcccggtattatgcttgtattagtaggcattattatgtgttgtctattatctgtttataggttcactcgacgaactaaactacctatacaagatatggttgtgccataatttttataaatttttttatgagtatttttacaaaaatgtataaagtgtatgtcttatgtatatttataaaaatgctaagtatgcgatgtatctatgttatttgtatttatctaaacaatacctctacctctagatattatacaaaaattttttatttcggcatattaaagtaaaatctagttaccttgaaaatgaatacagtgggtggttccgtatcaccagtaagaacataatagtcaaatacagtatccgattgagattttgcatacaatactagtctagaaagaaatttgtaatcatcttctgtgacgggagtccatatatctgtatcatcgtctagtttatcagtgtcccatgctatattcctgttatcatcattagttaatgaaaataactctcgtgcttcagaaaagtcaaatattgtatccatacatacatctccaaaactatcgcttatacgtttatctttaacgatacctatacctagatggttatttactaacagacattttccagatctattgactataactcctatagtttccacatcaaccaagtaatgatcatctattgttatataacaataacataactcttttccatttttatcagtatgtatatctatatcaacgtcgtcgttgtagtgaatagtagtcattgatctattatatgaaacggatatgtctagaacggcaattgttttacgtccagttaacactttcgttgatttaaagtctagagtctttgcaaacataatatccttatccgactttatatttcctgtagggtggtataattttattttgcctccacatatcggtgtttccaaatatattactagacaatattccatatagttattagttaagggtacccaattagaacacgtacgcttattatcatcatttggatcgtatttcataaaagttattgtgttatcgatgtcaacacattctacattttttaatcgtctatatagtatttttctgatattttctataatatcagaattgtcttccatcggaagttgtatactatcggaatcagttacatgtttaaataattctctgatgtcattccttatacaatcaaattcattattaaacagtttaatagtctgtagacctttatcgtcgtaaatatccattgtcttattagttacgcttatttttatgtgtttttacgttgctttattatattttataagaatgattgtttgacgaatcacgagaactattaagacacattattaggtatatattataaaaaagtttttgattacgatgttataagaggaaagaggacacattaacatcatacatcaattaactacattcttataacatcgtaatcaaaagaattgcaattttgatgtataacaactgtcaatgggttatggaattgtatattacatattatacggtatgttggtaacgacaaataccggtcggtaattgtctgccggtgtaatagaattatatatatctatctattacaccggccttgtatacataataataagttgtggtagtatgatctccatatttataatttaggactttgtattcagtatttttggaatcataaaaaataaaaaaaagttttactaatttaaaatttaaaaagtatttacatttttttcactgtttagtcgcggatatggaattcgatcctgccaaaatcaatacatcatctatagatcatgtaacaatattacaatacatagatgaaccaaatgatataagactaacagtatgcattatccgaaatattatatcaatatcacaaaaataaatacacatttggctaatcaatttcgggcttggaaaaaacgtatcgccggaagggactatatgactaacttatctagagatacaggaatacaacaatcaaaacttactgaaactatacgtaactgtcaaaaaaatagaaacatatatggtctatatatacactacaatttagttattaattggataaccgatgtgattatcaatcaatattaagagggttggtaaattggtacatagctaataatacctatacacccaataatacaacaaccatttctgagttggatatcatcaaaatactaaataaatacgaggacgtgtatagagtaagtaaagaaaaagaatgtggaatttgctatgaagttgtttactcaaaacgatagatactttggtttattggattcgtgtactcatatattttgcataacatgcatcaatatatggcatagaacacgaagagaaaccggtgcgtcggataattgtcctatatgccgtacccgttttagaaacataacaatgagcaagttctataagctagttaactaataaataaaaagtttaatttgttgacgacgtatgtcgttattttttctcgtataaaagattaaattcaattcaattcgttgtttctaatataatctgccgtattggatggattctcaagacaattgcatttagattatattatcatgaataaaaatagtagcacacaactacttcagcaaacattctttttataaatgccatctagcgtagcgaggacacaagtgaacctataattatcaaatttattagtatcggttacatgaaggactttacgtagagtgacgattccactatctgtggtacgaacggtttcatcttctttgatgccatcacccagatgttctataaacttggtatcctcgtccgatttcatatcctttgccaaccaatacatatagctaaactcaggcatatgttccacacatcctgaacaatgaaattctccagaagatgttacaatgtctagatttggacatttggtttcaaccgcgttaacatatgagtgaacacacccatacatgaaagcgatgagaaataggattctcatcttgccaaaatatcactagaaaaaatttatttatcagttttaaaggtataaaaaatacttattgttgctcgaatattttgtatttgatggtatacggaagattagaaatgtaggtattatcatcaactgattctatggttttatgtattctatcatgtttcactattgcgttggaaataatatcatatgcttccacatatattttattttgttttaactcataatactcacgtaattctggattattggcatatctatgaataattttagctccatgatcagtaaatattaatgagaacatagtattaccacctaccattatttttttcatctcattcaattcttaattgcaaagatctatataatcattatagcgttgacttatggactctggaatcttagacgatgtacagtcatctataatcatggcatatttaatacattgttttatagcatagtcgttatctacgatgttagatatttctctcaatgaatcaatcacacaatctaatgtaggtttatgacataatagcattttcagcagttcaatgtttttagattcgttgatggcaatggctatacatgtatatccgttatttgatctaatgttgacatctgaaccggattctagcagtaaagatactagagattgtttattatatctaacagccttgtgaagaagtgtttctcctcgtttgtcaatcatgttaatgtctttaagataaggtaggcaaatgtttatagtactaagaattgggcaagcataagacatgtcacaaagacccttttttgtatgtataagtgtaaaaattataacatccatagttggatttacataggtgtccaatcgggatctctccatcatcgagataattgatggcatctcccttccttttttagtagatatttcatcgtgtaagaatcaatattaatatttctaaagtatccgtgtatagcctctttatttaccacagctccatattccactagagggatatcgccgaatgtcatatactcaattagtatatgttggaggacatccgagttcattgttttcaatatcaaagagatggtttccttatcatttctccatagtggtacaatactacacattattccgtgcggctttccattttccaaaaacaatttgaccaaatctaaatctacatctttattgtatctataatcactatttagataatcagccataattcctcgagtgcaacatgttagatcgtctatatatgaataagcagtgttatctattcctttcattaacaatttaacgatgtctatatctatatgagatgacttaatataatattgaagagctgtacaatagtttttatctataaaagacggcttgattccgtgattaattagacatttaacaacttccggacgcacatatgctctcgtatccgactctgaatacagatgagagatgatatacagatgcaatacggtaccgcaatttcgtagttgataatcatcatacgcgtatcagtactcgtcctcataaagaacactgcagccattttctatgaacaaatcaataattttagaaacaggatcattgtcattacataattttctataactgaacgatggttttcacatttaacactcaagtcaaatccatgttctaccaacacctttatcaagtcaacgtctacatttttggatttcatatagctgaatatattaaagttatttatgttgctaaatccagtggcttctagtagagccatcgctatatccttattaactttaacatgtctactatttgtgtattcttctaatggggtaagctgtctccaatttttgcgtaatggattagtgccactgtctagtagtagtttgacgacctcgacattattacaatgctcattaaaaaggtatgcgtgtaaagcattattcttgaattggttcctggtatcattaggatctctgtctttcaacatctgtttaagttcatcaagagccacctcctcattttccaaatagtcaaacattttgactgaatgagctactgtgaactctatacacccacacaactaatgtcattaaatatcatgtcaaaaacttgtacaattattaataaaaataatttagtgtttaaattttaccagttccagattttacacctccgttaatacctccattaaccccactggacgatcctcctccccacattccaccgccaccagatgtataagttttagatcctttattactaccatcatgtccatggataaagacactccacatgccgccactaccccctttagaagacatattaataagacttaaggacaagtttaacaataaaattaatcacgagtaccctactaccaacctacactattatatgattatagtttctatttttacagtaccttgactaaagtttctagtcacaagagcaatactaccaacctacactattatatgattatagtttctatttttataggaacgcgtacgagaaaatcaaatgtctaatttctaacggtagtgttgataaacgattatcgtcaatggatacctcctctatcatgtcgtctattttcttactttgttctattaacttattagcattatatattatttgattataaaacttatattgcttattagcccaatctgtaaatatcggattattaacatatcgtttctttgtaggtttatttaacttgtacatcactgtaagcatgtccttaccatttattttaatttgacgcatatccgcaatttctttttcgcagtcggttataaattctatatatgatggatacatgctacatgtgtacttataatcgactaatatgaagtacttgatacatattttcagtaacgatttattattaccacctatgaataagtacctgtgatcgtctaggtaatcaactgttttcttaatacattcgatggttggtaatttactcagaataatttccaatatcttaatatataattctgctatttctgggatatatttatctgccagtataacacaaatagtaatacatgtaaacccatattttgttattatattaatgtctgcgccattatctattaaccattctactaggctgacactatgcgactcaatacaatgataaagtatactacatccatgtttatctattttgtttatatcattaatatacggcttacaaagttttagtatcgataacacatccaactcacgcatagagaaggtagggaataatggcataatatttattaggttatcatcattgtcattatctacaactaagtttccattttttaaaatatactcgacaactttaggatctctattgccaaatttttgaaaatatttatttatatgcttaaatctatataatgtagctccttcatcaatcatacatttaataacattgatgtatactgtatgataagatacatattctaacaatagatcttgtatagaatctgtatatcttttaagaattgtggatattaggatattattacataaactattacacaattctaaaatataaaacgtatcacggtcgaataatagttgatcaactatataattatcgattttgtgatttttcttcctaaactgtttacgtaaatagttagatagaatattcattagttcatgaccactatagttactatcgaataacgcgtcaaatatttcccgtttaatatcgcatttgtcaagataataatagagtgtggtatgttcacgataagtataataacgcatctctttttcgtgtgaaattaaatagtttattacgtccaaagatgtagcataaccatcttgtgacctagtaataatataataatagagaactgttttacccattctatcatcataatcagtggtgtagtcgtaatcgtaatcgtctaattcatcatcccaattataatattcaccagcacgtctaatctgttctattttgatcttgtatccatactgtatgttgctacatgtaggtattcctttatccaataatagtttaaacacatctacattgggatttgatgttgtagcgtatttttctacaatattaataccatttttgatactatttatttctatacctttcgaaattagtaatttcaataagtctatattgatgttatcagaacatagatattcgaatatatcaaaatcattgatatttttatagtcgactgacgacaataacaaaatcacaacatcgtttttgatattattatttttcttggtaacgtatgcctttaatggagtttcaccatcatactcatataatggatttgcaccactttctatcaatgattgtgcactgctggcatcgatgttaaatgttttacaactatcatagagtatcttatcgttaaccatgattggttgttgatgctatcgcattttttggtttctttcatttcagttatgtatggatttagcacgtttgggaagcatgagctcatatgatttcagtactgtagtgtcagtactattagtttcgatcagatcaatgtctagatctatagaatcaaaacacgataggtcagaagataatgaatatctgtacgcttctttttgtactgtaacttctggttttgttagatggttgcatcgtgctttaacgtcaatggtacaaattttatcctcgctttgtgtatcatattcgtccctactataaaattgtatattcagattatcatgcgatgtgtatacgctaacggtatcaataaacggagcacaccatttagtcataaccgtaatccaaaaatttttaaagtatatcttaacgaaagaagttgtgtcattgtctacggtgtatggtactagatcctcataagtgtatatatctagagtaatgtttaatttattaaatggttgataatatggatcctcgtgacaatttccgaagatggaaataagacataaacacgcaataaatctaattgcggacatggttactccttaaaaaaatacgaataatcaccttggctatttagtaagtgtcatttaacactatactcatattaatccatggactcataatctctatacgggattaacggatgttctatatacggggatgagtagttctcttctttaactttatactttttactaatcatatttagactgatgtatgggtaatagtgtttgaagagctcgttctcatcatcagaataaatcaatatctctgtttttttgttatacagatgtattacagcctcatatattacgtaatagaacgtgtcatctaccttattaactttcaccgcatagttgtttgcaaatacggttaatcctttgacctcgtcgatttccgaccaatctgggcgtataatgaatctaaactttaattgcttgtaatcattcgaaataatttttagtttgcatccgtagttatcccctttatgtaactgtaaatttctcaacgcgatatctccattaataatgatgtcgaattcgtgctgtatacccatactgaatggatgaacgaataccgacggcgttaatagtaatttactttttcatctttacatattgggtactagttttactatcataagtttataaattccacaagctactatggaataagccaaccatcttagtataccacacatgtcttaaagtttattaattaattacatgttgttttatatatatcgctacgaatttaaagagaaattagtttaggaagaaaaattatctatctacatcatcacgtctctgtattctacgatagagtgctactttaagatgcgacagatccgtgtcatcaaatatatactccattaaaatgattattccggcagcgaacttgatattggatatatcacaacctttgttaatatctacgacaatagacagcagtcccatggttccataaacagtgagtttatctttctttgaagagatattttgtagagatcttataaaactgtcgaatgacatcgcatttatatctttagctaaatcgtatatgttaccatcgtaatatctaaccgcgtctatcttaaacgtttccatcgctttaaagacgtttccgatagatggtctcatttcatcagtcatactgagccaacaaatataatcgtgtataacatctttgatagaatcagactctaaagaaaacgaatcggctttattatacgcattcatgataaacttaatgaaaaatgtttttcgttgtttaagttggatgaatagtatgtcttaataattgttattatttcattaattaatatttagtaacgagtacactctataaaaacgagaatgacataactaatcataactagttatcaaagtgtctaggacgcgtaattttcatatggtatagatcctgtaagcattgtctgtattctggagctattttctctatcgcattagtgagttcagaatatgttataaatttaaatcgaataacgaacataactttagtaaagtcgtctatattaactcttttattttctagccatcgtaataccatgtttaagatagtatattctctagttactacgatctcatcgttgtctagaatatcacatactgaatctacatccaattttagaaattggtctgtgttacatatctcttctatattattgttgatgtattgtcgtagaaaactattacgtagaccattttctttataaaacgaatatatagtactccaattatctttaccgatatatttgcacacataatccattctctcaatcactacatctttaagattttcgttgttaagatatttggctaaactatataattctattagatcatcaacagaatcagtatatatttttctagatccaaagacgaactctttggcgtcctctataatattcccagaaaagatattttcgtgttttagtttatcgagatctgatctgttcatatacgccatgattgtacggtacgttatgataaccgcataaaataaaaatccattttcatttttaaccaatactattcataattgagattgatgtaatactttgttactttgaacgtaaagacagtacacggatccgtatctccaacaagcacgtagtaatcaaatttggtgttgttaaacttcgcaatattcatcaatttagatagaaacttatactcatcatctgttttaggaatccatgtattattaccactttccaacttatcattatcccaggctatgtttcgtccatcatcgttgcgcagagtgaataattcttttgtattcggtagttcaaatatatgatccatgcatagatcggcaaagctattgtagatgtgatttttcctaaatctaatataaaactcgtttactagcaaacactttcctgatttatcgaccaagacacatatggtttctaaatctatcaagtggtggggatccatagttatgacgcagtaacatatattattacattcttgactgtcgctaatatctaaatatttattgttatcgtattggattctgcatatagatggcttgtatgtcaaagatatagaacacataaccaatttatagtcgcgctttacattctcgaatctaaagttaagagatttagaaaacattatatcctcggatgatgttatcactgtttctggagtaggatatattaaagtctttacagatttcgtccgattcaaataaatcactaaataatatcccacattatcatctgttagagtagtatcattaaatctattatattttatgaaagatatatcactgctcacctctatatttcgtacatttttaaactgtttgtataatatctctctgatacaatcagatatatctattgtgtcggtagacgataccgttacatttgaattaatggtgttccattttacaacttttaacaagttgaccaattcatttctaatagtatcaaactctccatgattaaatattttaatagtatccattttatatcactacggacacaaagtagctgacataaaccattgtataatttttatgttttatgtttattagcgtacacattttggaagttccggcttccatgtatttcctggagagcaagtagatgatgaggaaccagatagtttatatccgtacttgcacttaaagtctacattgtcgttgtatgagtatgatcttttaaacccgctagacaagtatccgtttgatattgtaggatgtggacatttaacaatctgacacgtgggtggatcggaccattctcctcctgaacacaggacactagagttaccaatcaacgaatatccactattgcaactataagttacaacgcttccatcggtataaaaatcctcgtatccgttatgtcttccgttggatatagatggaggggattggcatttaacagattcacaaataggtgcctcgggattccataccatagatccagtaaatcctaattcacaatacgatttagattcaccgatcaactgatatccgctattacaagagtacgttatactagagccaaagtctactccaccaatatcaagttggccattatcgatatctcgaggcgatgggcatctccgtttaatacattgattaaagagtgtccatccagtacctgtacatttagcatatataggtcccattttttgctttctgtatccaggtagacatagatattctatagtgtctcctatgttgtaattagcattagcatcagtctccacactattcttaaatttcatattaatgggtcgtgacggaatagtacagcatgatagaacgcatcctattcccaacaatgtcaggaacgtcacgctctccaccttcatatttatttatccgtaaaaatgttatcctggacatcgtacaaataataaaaagcccatatatgttcgctattgtagaaattgtttttcacagttgctcaaaaacgatggcagtgacttatgagttacgttacactttggagtctcatctttagtaaacatatcataatattcgatattacgagttgacatatcgaacaaattccaagtatttgattttggataatattcgtattttgcatctgctataattaagatataatcaccgcaagaacacacgaacatctttcctacatggttaaagtacatgtacaattctatccatttgtcttccttaactatatatttgtatagataattacgagtctcgtgagtaattccagtaattacatagatgtcgccgtcgtactctacagcataaactatactatgatgtctaggcatgggagacttttttatccaacgatttttagtgaaacattccacatcgtttaatactacatatttctcatacgtggtataaactccacccattacatatatatcatcgtttacgaataccgacgcgcctgaatatctaggagtaattaagtttggaagtcttatccatttcgaagtgccgtgtttcaaatattctgccacacccgttgaaatagaaaattctaatcctcctattacatataactttccatcgttaacacaagtactaacttctgattttaacgacgacatattagtaaccgttttccattttttcgttttaagatctacccgcgatacggaataaacatgtctattgttaatcatgccgccaataatgtatagacaattatgtaaaacatttgcattatagaattgtctatctgtattaccgactatcgtccaatattctgttctaggagagtaatgggttattgtggatatataatcagagtttttaatgactactatattatgttttataccatttcgtgtcactggctttgtagatttggatatagttaatcccaacaatgatatagcattgcgcatagtattagtcataaacttgggatgtaaaatgttgatgatatctacatcgtttggatttttatgtatccactttaataatatcatagctgtaacatcctcatgatttacgttaacgtcttcgtgggataagatagttgtcagttcatcctttgataattttccaaattctggatcggatgtcaccgcagtaatattgttgattatttctgacatcgacgcattatatagttttttaattccatatcttttagaaaagttaaacatccttatacaatttgtgaaattaatattatgaatcatagtttttacacatagatctactacaggcggaacatcaattattatggcagcaactagtatcatttctacattgtttatggtgatgtttatcttcttccagcgcatatagtctaatagcgattcaaacgcgtgatagtttataccattcaatataatcgcttcatcctttagatggtgatcctgaatgcgtttaaaaaaattatacggagacgccgtaataatttccttattcacttgtataatttccccattgatagaaaatattacgctttccattcttaaagtactataagtaattatagtataatgtaaacgtttatatattcaatatttttataaaaatcattttgacattaattcctttttaaatttccgtctatcatctatagaaacatattctatgaatttataaaatgcttttacgtgtcctatcgtaggcgatagaaccgctaaaaagcctatcgaatttctacaaaagaatctgttatatggtatagggagagtataaaacattaaatgtccgtacttattaaagtattcagtagccaatcctaactctttcgaatacttattaatggctcttgttctgtacgaatctatttttttgaacaacggacctagtggtatatcttgttctatgtatctaaaataatgtctgactagatccgttagtttaatatccgcagtcatcttgtctagaatggcaaatctaactgcgggtttaggctttagtttagtttctatatctacatctatgtctttatctaacaccaaaaatataatagctaatattttattacaatcatccggatattcttctacgatctcactaactaatgtttctttggttatactagtatagtcactatcggacaaataaagaaaatcagatgatcgatgaataatacatttaaattcatcatctgtaagatttttgagatgtctcattagaatattattagggttagtactcattatcattcggcagctattacttattttattatttttcaccatatagatcaatcattagatcatcaaaatatgtttcaatcatcctaaagagtatggtaaatgactcttcccatctaatttctgaacgttcaccaatgtctctagccactttggcactaatagcgatcattcgcttagcgtcttctatattattaactggttgattcaatctatctagcaatggaccgtcggacagcgtcattctcatgttcttaatcaatgtacatacatcgccgtcatctaccaattcatccaacaacataagctttttaaaatcatcattataataggtttgatcgttgtcatttctccaaagaatatatctaataagtagagtcctcatgcttagttaacaactattttttatgttaaatcaattagtacaccgctatgtttaatacttattcatattttagtttttaggattgagaatcaatacaaaaattaatgcatcattaattttagaaatacttagtttccacgtagtcaatgaaacatttgaactcatcgtacaggacgttctcgtacaggacgtaactataaaccggtttatatttgttcaagatagatacaaatccgataactttttttacgaattctacgggatccactttaaaagtgtcataccgggttctttttatttttttaaacagatcaatggtgtgatgttgattaggtcttttacgaatttgatatagaatagcgtttacatattctccataatggtcaatcgccatttgttcgtatgtcataaattctttaattatatgacactgtgtattatttagttcatccttgttcattgttaggaatctatccaaaatggcaattatactagaactataggtgcgttgtatacacatattgatgtgtctgtttatacaatccatgatatttggatccatgctactaccttcgggtaaaattgtagcatcatataccatttctagtactttaggttcattattatccattgcagaggacgtcatgatcgaatcataaaaaaatatattatttttatgttattttgttaaaaataatcatcgaatacttcgtaagatactccttcatgaacataatcagttacaaaacgtttatatgaagtaaagtatctacgatttttacaaaagtccggatgcataagtacaaagtacgcgataaacggaataataatagatttatctagtctatctttttctatagctttcatagttagatacatggtctcagaagtaggattatgtaacatcagcttcgataaaatgactgggttatttagtcttacacattcgctcatacatgtatgaccgttaactacagagtctacactaaaatgattgaacaatagatagtctaccattgtttcgtattcagatagtacagcgtagtacatggcatcttcacaaattatatcattgtctaatagatatttgacgcatcttatggatcccacttcaacagccattttaaaatcggtagaatcatattgctttcctttatcattaataatttctagaacatcatctctatcataaaagatacaaatattaactgtttgatccgtaataacattgctagtcgatagcaatttgttaataagatgcgctgggctcaatgtcttaataagaagtgtaagaggactatctccgaatttgttttgtttattaacatccgttgatggaagtaaaagatctataatgtctacattcttgactgttttagagcatacaatatggagaggtgtatttccatcatgatctggttttgagggactaattcctagtttcatcatccatgagattgtagaagcttttggattgtctgacataagatgtctatgaatatgatttttgccaaatttatccactatcctggcttcgaatccgatggacattatttttttaaacactctttctgaaggatctgtacacgccaacaacggaccacatccttcttcatcaaccgagttgttaatcttggctccatactgtaccaataaatttattctctctatgacttcatcatctgttcccgagagataatatagaggcgttttatgctgtttatcacacgcgtttggatctgcgccgtgcgtcagcagcatcgcgactattctattattattaattttagaagctatatgcaatggataatttccatcatcatccgtctcatttggagagtatcctctatgaagaagttcttcgacaaatcgttcatctagtcctttaattccacaatacgcatgtagaatgtgataattatttccagaaggttcgatagcttgtagcatattcctaaatacatctaaatttttactattatatttggcataaagagatagataatactcggccaacataatgttgtccattgtagtataaaaattaatatttctatttctatttctgtatatttgcaacaatttactctctataacaaatatcataacttagttcttttatgtcaagaaggcactggtttagttcatctataaatgtcacgccataactactacgcatgccatactcagaattatgataaagatatttatccttggggtgtaggtaatggggattaatctttgttggatcagtctctaagttaacacatgtcacacatgatccatttatagttatatcacacgatgatgatttatgaattgattccggaagatcgctatcgtattttgtggttccacaattcatttccatacatgttattgtcacactaatattatgatgaactttatctagccgctgagtggtaaacaacagaacagatagtttattatctttaccaacaccctcagccgctgccacaaatctctgatccgtatccatgatggtcatgtttatttctagtccgtatccagtcaacactatgttagcatttctgtcgatatagctttcactcatatgacactcaccaataatagtagaattaatgtcgtaatttacaccaatagtgagttcggcggcaaagtaccaataccggtaatcttgtcgaggaggacatatagtattcttgtattctaccgaatacccgagagatgcgatacaaaagagtaagactaatttgtaaaccatcttactcaaaatatgtaacaatagtacgatgcaatgagtaagacaataggaaatctatcttatatacacataattattctatcaattttaccaattagttagtgtaatgttaacaaaaatgtgggagaatctaattagtttttctttacacaattgacgtacatgagtctgagttccttgtttttgctaattatttcatccaatttattattcttgacgatatcgagatcttttgtataggagtcagacttgtattcaacatgcttttctataatcattttagctatttcggcatcatccaatagtacattttccagattagcagaatagatattaatgtcgtatttgaacagagcctgtaacatctcaatgtctttattatctatagccaatttaatgtccggaatgaagagaagggaattattggtgtttgtcgacgtcatatagtcgagcaagagaatcatcatatccacgtgtccattttttatagtgatgtgaatacaactaaggagaatagccagatcaaaagtagatggtatctctgaaagaaagtaggaaacaatacttacatcattaagcatgacggcatgataaaatgaagttttccatccagttttcccatagaacatcagtctccaatttttcttaacaaacagttttaccgtttgcatgttaccactatcaaccgcataatacaatgcagtgtttcccttgtcatcaaattgtgaatcatccagtccactgaatagcaaaatctttactattttggtatcttccaatgtggctgcctgatgtaatggaaattcattctctagaagatttttcaatgctccagcgttcaacaacgtacatactagacgcacgttattatcagctattgcataatacaaggcactatgtccatggacatccgccttaaatgtatctttactagagagaaagcttttcagctgcttagacttccaagtattaattcgtgacagatccatgtctgaaacgagacgctaattagtgtatattttttcattttttatcatattgcaccagaattaataatatctctaatagatctgattagtagatacatggctatcgcaaaacaacatatacacatttaataaaaataatatttattaagaaaattcagatttcacgtacccatcaatataaataaaataatgattccttacaccgtacccatattaaggagattccaccttacccataaacaatataaatccagtaatatcatgtctgatgatgaacacaaatggtgtattaaattccagtttttcaggagatgatctcgccgtagctaccataatagtagatgcctctgctacagttccttgttcgtcgacatctatctttgcattctgaaacattttataaatatataatgggtccctagtcatatgtttaaacgacgcattatctggattaaacatactaggagccatcatttcggctatcgacttaatatccctcttattttcgatagaaaatttagggagtttaagattgtacactttattccctaattgagacgaccaatagtctaattttgcagccgtgatagaatctgtgaaatgggtcatattatcacctattgccaggtacatactaatattagcatccttatacggaaggcgtaccatgtcatattctttgtcatcgattgtgattgtatttccttgcaatttagtaactacgttcatcatgggaaccgttttcgtaccgtacttattagtaaaactagcattgcgtgttttagtgatatcaaacggatattgccatatacctttaaaatatatagtattaatgattgcccatagagtattattgtcgagcatattagaatctactacattagacataccggatctacgttctactatagaattaattttattaaccgcatctcgtctaaagtttaatctatataggccgaatctatgatattgttgataatacgacggtttaatgcacacagtattatctacgaaactttgataagttagatcagtgtacgtatatttagatgttttcagcttagctaatcctgatattaattctgtaaatgctggacccagatctctttttctcaaatccatagtcttcaataattctattctagtattacctgatgcaggcaatagcgacataaacatagaaaacgaataaccaaacggtgagaagacaatattatcatcttgaatatttttatacgctactataccggcattggtaaatccttgtagacgataggcggacgctgaacacgctaacgatagtatcaataacgcaatcatgattttatggtattaataattaaccttatttttatgttcggtataaaaaaattattgatgtctacacatccttttgtaattgacatctatatatccttttgtataatcaactctaatcactttaacttttacagttttccctaccagtttatccctatattcaacatatctatccatatgcatcttaacactctctgccaagatagcttcagagtgaggatagtcaaaaagataaatatatagagcataatcattctcgtatactctgccctttattacatcacccgcattgggcaacgaataacaaaatgcaagcatcttgttaacgggctcgtaaattgggataaaaattatgtttttattgtcttatatctattttattcaagagaatattcaggaatttctttttccggttgtatctcgtcgcagtatatatcatttgtacattgtttcatattttttaatagtttacaccttttagtaggactagtatcgtacaattcatagctgtattttgaattccaatcacgcataaaaatatcttccaattgttgacgaagacctaatccatcatccggtgtaatattaatagatgctccacatgtatccgtaaagtaatttcctgtccaatttgaggtacctatataggccgttttatcggttaccatatatttggcatggtttaccctagaatacggaatgggaggatcagcatctggtacaataaatagctttacttctatatttatgtttttagattttagcatagcgatagatcttaaaaagtttctcatgataaacgaagatcgttgccagcaactaatcaatagcttaacggatacttgtctgtctatagcggatcttcttaattcatcttctatataaggccaaaacaaaattttacccgccttcgaataaataatagggataaagttcataacagatacataaacgaatttactcgcatttctaatacatgacaataaagcggttaaatcattggttctttccatagtacatagttgttgcggtgcagaagcaataaatacagagtgtggaacgccgcttacgttaatactaagaggatgatctgtattataatacgacggataaaagtttttccaattatatggtagattgttaactccaagataccagtatacctcaaaaatttgagtgagatccgctgccaagttcctattattgaagatcgcaatacccaattccttgacctgagttagtgatctccaatccatgttagcgcttcctaaataaatatgtgtattatcagatatccaaaattttgtatgaagaactcctcctaggatatttgtaatatctatgtatcgtacttcaactccggccatttgtagtctttcaacatcctttaatggtttgttagatttattaacggctactctaactcgtactcctcttttgggtaattgtacaatctcgtttaatattatcgtgccgaaattcgtacccacttcatccgataaactccaataaaaagatgatatatctagtgtttttgtggtattggatagaatttccctccacatgttaaatgtagacaaatatactttatcaaattgcatacctataggaatagtttctgtaatcactgcgattgtattatccggattcattttatttgttaaaagaataatcctatatcacttcactctattaaaaatccaagtttctatttctttcatgactgattttttaacttcatccgtttccttatgaagatgatgtttggcaccttcataaatttttatttctctattacaatttgcatgttgcatgaaataatatgcacctaaaacatcgctaatcttattgtttgttccctggagtatgagagtcgggggggtgttaatcttggaaattatttttctaaccttgttggtagccttcaagacctgactagcaaatccagccttaattttttcatgattgactaatgggtcgtattggtatttataaactttatccatatctctagatactgattctggacatagctttccgactggcgcatttggtgtgatggttcccataagtttggcagctagcagattcagtcttgaaacagcatctgcattaactagaggagacattagaatcattgctgtaaacaagtttggattatcgtaagaggctagctcccatggaatgacccaataagtagatttaatagttaccacgtgctgtaccaaagtcatcaatcatcattttttcaccattacttcttccatgtccaatatgatcatgtgagaatactaaaattcctaacgatgatatgttttcagctagttcgtcataacgtccagaatgtttaccagctccatgacttatgaatactaatgccttaggatatgtaataggtttccaatatttacaatatatgtaatcattgtccagattgaacatacagtttgcactcatgattcacgttatataactatcaatattaacagttcgtttgatgatcatattatttttatgttttattgataattgtaaaaacatacaattaaatcaatatagaggaaggagacggctactgtcttttgtaagatagtcatggcgactaaattagattatgaggatgctgttttttactttgtggatgatgataaaatatgtagtcgcgactccatcatcgatctaatagatgaatatattacgtggagaaatcatgttatagtgtttaacaaagatattaccagttgtggaagactgtacaaggaattgatgaagttcgatgatgtcgctatacggtactatggtattgataaaattaatgagattgtcgaagctatgagcgaaggagaccactacatcaattttacaaaagtccatgatcaggaaagtttattcgctaccataggaatatgtgctaaaatcactgaacattggggatacaaaaagatttcagaatctagattccaatcattgggaaacattacagatttgatgaccgacgataatataaacatcttgatactttttctagaaaaaaaattgaattgatgatataggggtcttcataacgcataattattacgttagcattctatatccgtgttaaaaaaaattatcctatcatgtatttgagagttttatatgtagcaaacatgatagctgtgatgccaataagctttagatattcacgcgtgctagtgttagggatggtattatctggtggtgaaatgtccgttatataatctacaaaacaatcatcgcatatagtatgcgatagtagagtaaacatttttatagtttttactggattcatacatcgtctacccaattcggttataaatgaaattgtcgccaatcttacacccaaccccttgttatccattagcatagtattaacttcgttatttatgtcataaactgtaaatgattttgtagatgccatatcatacatgatattcatgtccctattataatcattactaactttatcacaatatatgttgataatatctatatatgatctagtctttgtgggcaactgtctatacaagtcgtctaaacgttgtttactcatatagtatcgaacagccatcattacatggtcccgttccgttgatagataatcgagtatgttagtggacttgtcaaatctatataccatattttctggaagtggatatacatagtcgtgatcaacattattgctagcctcatcttctatatcctgtactataccattatctatatcatctacataatctatgatattattacacataaacatcgacaacatactattgtttattatctaagtcctgttgatccaaacccttgatctcctctatttgtactatctagagattgtacttcttccagttctggataatatatacgttgatagattagctgagctattctatctccagtatttacattaaacgtacattttccattattaataagaatgactcctatgtttcccctataatcttcgtctattacaccacctcctatatcaatgccttttagtgacagaccagacctaggagctattctaccatagcagaacttaggcatggacatactaatatctgtcttaattaactgtctttctcctggagggatagtataatcgtaagcgctatacaaatcatatccggcagcacccggcgattgcctagtaggagatttagctctgttagtttccttaacaaatctaactggtgagttaatattcatgttgaacataaaactaatattttatttcaaaattatttaccatcccatatattccatgaataagtgtgatgattgtacacttctatagtatctatatacgatccacgataaaatcctcctatcaatagcagtttattatccactatgatcaattctggattatccctcggataaataggatcatctatcagagtccatgtattgctggattcacaataaaattccgcatttctaccaaccaagaataaccttctaccgaacactaacgcgcatgatttataatgaggataataagtggatggtccaaactgccactgatcatgattgggtagcaaatattctgtagttgtatcagtttcagaatgtcctcccattacgtatataacattgtttatggatgccactgctggattacatctaggtttcagaagactcggcatattaacccaagcagcatccccgtggaaccaacgctcaacagatgtgggatttggtagacctcctactacgtataatttattgttagcgggtatcccgctagcatacagtctggggctattcatcggaggaattggaatccaattgtttgatatataatttaccgctatagcattgttatgtatttcattgttcatccatccaccgatgagatatactacttctccaacatgagtacttgtacacatatggaatatatctataatttgatccatgttcataggatactctatgaatggatacttgtatgatttgcgtggttgtttatcacaatgaaatattttggtacagtctagtatccattttacattatttatacctctgggagaaagataatttgacctgattacatttttgataaggagtagcagatttcctaatttatttcttcgctttatataccacttaatgacaaaatcaactacataatcctcatctggaacatttagttcatcgctttctagaataagtttcatagatagataatcaaaattgtctatgatgtcatcttccagttccaaaaagtgtttggcaataaagtttttagtatgacataagagattggatagtccgtattctatacccatcatgtaacactcgacacaatattcctttctaaaatctcgtaagataaagtttatacaagtgtagatgataaattctacagaggttaatatagaagcacgtaataaattgacgacgttatgactatctatatatacctttccagtatacgagtaaataactatagaagttaaactgtgaatgtcaaggtctagacaaaccctcgtaactggatctttatttttcgtgtatttttgacgtaaatgtgtgcgaaagtaaggagataactttttcaatatcgtagaattgactattatattgcctcctatggcatcaataattgttttgaatttcttagtcatagacaatgctaatatattcttacagtacacagtattgacaaatatcggcatttatgtttctttaaaagtcaacatctagagaaaaatgattatctttttgagacataactcccattttttggtattcacccacacgtttttcgaaaaaattagtttttccttccaatgatatattttccatgaaatcaaacggattggtaacattataaatttttttaaatcccaattcagaaatcaatctatccgcgacgaattctatatatgttttcatcatttcacaattcattcctataagtttaactggaagagccgcagtaagaaattcttgttcaatggatactgcatctgttataatagatctaacggtttcttcactcggtggatgcaataaatgtttaaacatcaaacatgcgaaatcgcagtgcagaccctcgtctctactaattagttcgttggaaaacgtgagtccgggcattaggccacgctttttaagccaaaatatggaagcgaatgatccggaaaagaagattccttctactgcagcaaaggcaataagtctctctccataaccggcgctgtcatgtatccacttttgagcccaatcggccttcttttttacacaaggcatcgtttctatggcattaaagagatagtttttttcattactatctttaacataagtatcgatcaaaagactatacatttccgaatgaatgttttcaatggccatctgaaatccgtagaaacatctagcctcggtaatctgtacttctgtacaaaatcgttccgccaaattttcattcactattccgtcactggctgcaaaaaacgccaatacatgttttataaaatatttttcgtctggtgttagtttattccaatcattgatatctttagatatatctacttcttccactgtccaaaatgatgcttctgcctttttatacatgttccagatgtcatgatattggattgggaaaataacaaatctatttggatttggtgcaaggatgggttccataactaaattaacaataacaataaattttttttcagttatctatatgcctgtacttggatcttttgtacatcgatatcgccgcaatcactacaataattacaagtattattgatagcattgttattagtactatcataattaaattatctacattcatgggtgctgaataatcgttattatcatcattatcattttgtaattgtgacatcatactagataaatcgtttgcgagattgttgtgggaagcgggcatggaggatgcattatcattattatttaacgccttccattcggattcacaaatgttacgcacattcaacattttatggaaactataattttgtgaaaacaaataacaagaaaactcgtcatcgttcaaatttttaacgatagtaaaccgattaaacgtcgagctaatttctaacgctagcgactctgttggatatgggtttccagatatatatcttttcagttcccctacgtatctataatcatctgtaggaaatggaagatatttccatttatctactgttcctaatatcatatgtggtggtgtagtagaaccattaagcgcgaaagatgttatttcgcatcgtattttaacttcgcaataatttctggttagataacgcactctaccagtcaagtcaatgatattagcctttacagatatattcatagtagtcgtaacgatgactccatcttttagatgcgatactcctttgtatgtaccagaatcttcgtacctcaaactcgatatatttaaacaagttaatgagatattaacgcgttttatgaatgatgatatataaccagaagttttatcctcggtggctagcgctataaccttatcattataataccaactagtgtgattaatatgtgacacgtcagtgtgggtacaaatatgtacattatcgtctacgtcgtattcgatacatccgcatacagccaacaaatataaaatgacaaatactctaacgccgttcgtacccatcttgatgcggtttaataaatgttttgatttcaatttattgtaaaaaaagattcggttttatactgttcgatattctcattgcttatattttcatctatcatctccacacagtcaaatccgtggttagcatgcacctcatcaaccggtaaaagactatcggactcttctatcattataactctagaatatttaatttggtcattattaatcaagtcaattatcttatttttaacaaacgtgagtattttactcattttttataaaaacttttagaaatatacagactctatcgtgtgtctatatcttctttttatatccaatgtatttatgtctgatttttcttcatttatcatatataatggtccaaattctacacgtgcttcggattcatccagatcattaaggttcttataattgtaacatccttctcttccctcttctacatcttccttcttattcttattcttagcgtcacagaatctaccacagcaggatcccatgacgagcgtcatattaaactaatccattttcaattataatatatgattagtaatgaccattaaaataaaaaatattcttcataaccggcaagaaagtgaaaagttcacattgaaactatgtcagtagtatacatcatgaaatgatgatatatatatatactctattttggtggaggattatatgatataattcgtggataatcattcttaagacacatttcttcattcgtaaatcttttcacgttaaatgagtgtccatattttgcaatttcttcatatgatggcggtgtacgtggacgaggctgctcctgttcttgttgtagtcgccgactgtcgtgtctgcgtttagatccctccattatcgcgattgcgtagatggagtactattttataccttgtaattaaatttttttattaattaaacgtataaaaacgttccgtatctgtatttaagagccagatttcgtctaatagaacaaatagctacagtaaaaataactagaataattgctacacccactagaaaccacggatcgtaatacggcaatcggttttcgataataggtggaacgtatattttatttaaggacttaacaattgtctgtaaaccacaatttgcttccgcggatcctgtattaactatctgtaaaagcatatgttgaccgggcggagccgaacattctccgatatctaatttctgtatatctataatattattaacctccgcatacgcattacagttcttttctagcttggataccgcactaggtacatcgtctagatctattcctatttcctcagcgatagctcttctatccttttccggaagcaatgaaatcacttcaataaatgattcaaccatgagtgtgaaactaagtcgagaattactcatgcatttgttagttattcggagcgcgcaatttttaaactgtcctataacctctcctatatgaatagcacaagtgacattagtagggatagaatgttgagctaatttttgtaaataactatctataaaaagattatacaaagttttaaactctttagtttccgccatttatccagtctgagaaaatgtctctcataataaatttttccaagaaactaattgggtgaagaatggaaacctttaatctatatttatcacagtctgttttggtacacatgatgaattcttccaatgccgtactaaattcgatatctttttcgatttctggatatgtttttaataaagtatgaacaaagaaatggaaatcgtaataccagttatgtttaactttgaaattgttttttattttcttgttaatgattccagccacttgggaaaagtcaaagtcgtttaatgccgatttaatacgttcattaaaaacaaactttttatcctttagatgaattattattggttcattggaatcaaaaagtaagatattatcgggtttaagatctgcgtgtaaaaagttgtcgcaacagggtagttcgtagattttaatgtataacagagccatctgtaaaaagataaactttatgtattgtaccaaagatttaaatcctaatttgatagctaactcggtatctactttatctgccgaatacagtgctaggggaaaaattataatgtttcctctttcgtattcgtagttagttctcttttcatgttcgaaaaagtgaaacatgcggttaaaatagtttataacattaatattactgttaataactgccggataaaagtgggatagtaatttcacgaatttgatactgtcctttctctcgttaaacgcctttaaaaaaactttagaagaatatctcaatgagagttcctgaccatccatagtttgtatcaataatagcaacatatgaagaacccgtttatacagagtatgtaaaaatgttaatttatagtttaatcccatggcccacgcacacacgattaattttttttcatctccctttagattgttgtatagaaatttgggtactgtgaactccgccgtagtttccatgggactatataattttgtggcctcgaatacaaattttactacatagttatctatcttaaagactataccatatcctcctgtagatatgtgataaaaatcgtcgtttataggataaaatcgtttatccttttgttggaaaaaggatgaattaatgtaatcattctcttctatctttagtagtgtttccttattaaaattcttaaaataatttaacaatctaactgacggagcccaattttggtgtaaatctaattgggacattatattgttaaaatacaaacagtctcctaatataacagtatctgataatctatggggagacatccattgatattcaggggatgaatcattggcaacacccatttattgtacaaaaagccccaatttacaaacgaaagtccaggtttgatagagacaaactattaactattttgtctctgtttttaacacctccacagtttttaatttctttagtaatgaaattattcacaatatcagtatcttctttatctaccagagattttactaacttgataaccttggctgtctcattcaatagggtagtaatatttgtatgtgtgatattgatatctttttgaattgtttcttttagaagtgattctttgatggtgccagcatacgaattacaataatgcagaaactcggttaacatgcaggaattatagtaagccaattccaattgttgcctgtgttgtattagagtgtcaatatgagcaatggtgtccttgcgtttctctgatagaatgcgagcagcgattttggcgttatcatttgacgatatttctggaatgacgaatcctgtttctactaactttttggtaggacaaagtgaaacaatcaagaagatagcttctcctcctatttgtggaagaaattgaactcctctagatgatctactgacgatagtatctccttgacagatattggaccgaattacagaagtacctggaatgtaaagccctgaaaccccctcattttttaagcagattgttgccgtaaatcctgcactatgcccaagatagagagctcctttggtgaatccatctctatgtttcagtttaaccaagaaacagtcagctggtctaaaatttccatctctatctaatacagcatctaacttgatgtcaggaactatgaccggtttaatgttatatgtaacattgagtaaatccttaagttcataatcatcactgtcatcagttatgtacgatccaaacaatgtttctaccggcatagtggatacgaagatgctatccatcagaatgtttccctgattagtattttctatatagctattcttctttaaacgattttccaaatcagtaactatgttcatttttttaggagtaggacgcctagccagtatggaagaggattttctagatcctctcttcaacatctttgatctcgatggaatgcaaaaccccatagtgaaacaaccaacgataaaaataatattgtttttcactttttataattttaccatctgactcatggattcattaatatctttataagagctactaacgtataattctttataactgaactgagatatatacaccggatctatggtttccataattgagtaaatgaatgctcggcaataactaatggcaaatgtatagaacaacgaaattatactagagttgttaaagttaatattttctatgagctgttccaataaattatttgttgtgactgcgttcaagtcataaatcatcttgatactatccagtaaaccgtttttaagttctggaatattattatcccattgtaaagcccctaattcgactatcgaatatcctgctctgatagcagtttcaatatcgacggacgtcaatactgtaataaaggtggtagtattgtcatcatcgtgataaactactggaatatggtcgttagtaggtacggtaactttacacaacgcgatatataactttccttttgtaccatttttaacgtagttgggacgtcctgcagggtattgttttgaagaaatgatatcgagaacagatttgatacgatatttgttggattcctgattattcactataatataatctagacagatagatgattcgataaatagagaaggtatatcgttggtaggataatacatccccattccagtattctcggatactctattgatgacactagttaagaacatgtcttctattctagaaaacgaaaacatcctacatggactcattaaaacttctaacgctcctgattgtgtctcgaatgcctcgtacaaggatttcaaggatgccatagattctttgaccaacgatttagaattgcgtttagcatctgatttttttattaaatcgaatggtcggctctctggtttgctaccccaatgataacaatagtcttgtaaagataaaccgcaagaaaatttatacgcatccatccaaataaccctagcaccatcggatgatattaatgtattattatagattttccatccacaattattgggccagtatactgttagcaacggtatatcgaatagattactcatgtaacctactagaatgatagttcgtgtactagtcataatatctttaatccaatctaaaaaatttaaaattagattttttacactgttaaagttaacaaaagtattacccgggtacgtggatatcatatatggcattggtccattatcagtaatagctccataaactgatacggcgatggtttttatatgtgtttgatctaacgaggaagaaattcgcgcccacaattcatctctagatatgtatttaatatcaaacggtaacacatcaatttcgggacgcgtatatgtttctaaatttttaatccaaatataatgatgacctatatgccctattatcatactgtcaactatagtacacctagggaacttacgatacatctgtttcctataatcgttaaattttacaaatctataacatgctaaaccttttgacgacagccattcattaatttctgatatggaatctgtattctcgataccgtatcgttctaaagccagtgctatatctccctgttcgtgggaacgctttcgtataatatcgatcaacggataatctgaagtttttggagaataatatgactcatgatctatttcgtccataaacaatctagacataggaattggaggcgatgatcttaattttgtgcaatgagtcgtcaatcctataacttctaatcttgtaatattcatcatcgacataatactatctatgttatcatcgtatattagtataccatgaccttcttcatttcgtgccaaaatgatatacagtcttaaatagttacgcaatatctcaatagtttcataattgttagctgttttcatcaaggtttgtatcctgtttaacatgatggcgttctataacgtctctattttctatttttaattttttaaatttttaacgatttactgtggctagatacccaatctctctcaaatatttttttagcctcgcttacaagctgtttatctatactattaaaactgacgaatccgtgattttggtaatgggttccgtcgaaatttgccgaagtgatatgaacatattcgtcgtcgactatcaacaattttgtattattctgaatagtgaaaaccttcacagatagatcattttgaacacacaacgcatctagacttttggcggttgccatagaatatacgtcgttcttatcccaattaccaactagaagtctgatcttaactcctctattaatggctgcttctataatggagttgtaaatgtcgggccaatagtagctattaccgtcgacacgtgtagtgggaactatggccaaatgttcaatatctatactagtcttagctgacctgagtttatcaataactacatcggtatctagatctctagaatatcccaataggtgttccggagaatcagtaaagaacactccacctataggattcttaatatgatacgcagtgctaactggcaaacaacaagccgcagagcataaattcaaccatgaattttttgcgctattaaaggctttaaaagtatcaaatcttctacgaagatctgtggccagcgggggataatcagaatatacacctaacgttttaatcgtatgtatagatcctccagtaaatgacgcgtttcctacataacatctttcatcatctgacacccaaaaacaaccgagtagtagtcccacattattttttttatctatattaacggttataaaatttatatccgggcagtgactttgtagctctcccagatttcttttccctcgttcatctagcaaaactattattttaatccctttttcagatgcctcttttagtttatcaaaaataagcgctcccctagtcgtactcagaggattacaacaaaaagatgctatgtatatatatttcttagctagagtgataatttcgttaaaacattcaaatgttgttaaatgatcggatctaaaatccatattttctggtagtgtttctaccagcctacattttgctcccgcaggtaccgatgcaaatggccacatttagttaacataaaaacttatacatcctgttctatcaacgattctagaatatcatcggctatatcgctaaaattttcatcaaagtcgacatcacaacctaactcagtcaatatattaagaagttccatgatgtcatcttcgtctatttctatatccgtatccattgtagattgttgaccgattatcgagtttaaatcattactaatactcaatccttcagaatacaatctgtgtttcattgtaaatttataggcggtgtatttaagttggtagattttcaattatgtattaatatagcaacagtagttcttgctcctccttgattctagcatcctcttcattattttcttctacgtacataaacatgtccaatacgttagacaacacaccgacgatggcggccgctacagacacgaatatgactaaaccgatgaccatttaaaaacccctctctagctttcacttaaactgtatcgatcattcttttagcacatgtataatataaaaacattattctatttcgaatttaggcttccaaaaatttttcatccgtaaaccgataataatatatatagacttgttaatagtcggaataaatagattaatgcttaaactatcatcatctccacgattagagatacaatatttacattctttttgctgtttcgaaactttatcaatacacgttaatacaaacccaggaaggagatattgaaactgaggctgttgaaaatgaaacggtgaatacaataattcagataatgtaaaatcatgattccgtattctgatgatattagaactgctaatggatgtcgatggtatgtatctaggagtatctattttaacaaagcatcgatttgctaatatacaattatccttttgattaattgttattttattcatattcttaaaaggtttcatatttatcaattcttctacattaaaaatttccatttttaatttatgtagccccgcaatactcctcattacgtttcattttttgtctataatatccattttgttcatctcggtacatagattatccaattgagaagcgcatttagtagttttgtacattttaagtttattgacgaatcgtcgaaaactagttatagttaacattttattatttgataccctgatattaatacccctgccgttactattatttataactgatgtaatccacgtaacattggaattaactatcgatagtaatgcatcgacgcttccaaaattgtctattataaactcaccgataatttttttattgcatgttttcatattcattaggattatcaaatctttaatcttattacgattgtatgcgttgatattacaagacgtcattctaaaagacggaggatctccatcaaatgccagacaatcacgtacaaagtacatggaaataggttttgttctattgcgcatcatagatttatatagaacacccgtagaaatactaatttgttttactctataaaatactaatgcatctatttcatcgttttgtataacgtctttccaagtgtcaaattccaaatttttttcattgatagtaccaaattcttctatctctttaactacttgcatagataggtaattacagtgatgcctacatgccgttttttgaaactgaatagatgcgtctagaagcgatgctacgctagtcacaatcaccactttcatatttagaatatatatatgtaaaaatatagtagaatttcattttgtttttttctatgctataaatgaattctcattttgcatctgctcatactccgttttatattaataccaaagaaggaagatatctggttctaaaagccgttaaagtatgcgatgttagaactgtagaatgcgaaggaagtaaagcttcctgcgtactcaaagtagataaaccctcatcgcccgcgtgtgagagaagaccttcgtccccgtccagatgcgagagaatgaataaccctggaaaacaagttccgtttatgaggacggacatgctacaaaatatgttcgcggctaatcgcgataatgtagcttctagacttttgtcctaaaatactattatatccttttcgatattaataaatccgtgtcgtccaggttttttatctctttcagtatgtgaatagataggtattttatctctattcatcatcgaatttaagagatccgataaacattgtttgtattctccagatgtcagcatctgatacaacaatatatgtgcacataaacctctggcacttatttcatgtaccttccccttatcactaaggagaatagtatttgagaaatatgtatacatgatattatcatgaattagatatacagaatttgtaacactctcgaaatcacacgatgtgtcggcgttaagatctaatatatcactcgataacacattttcatctagatacactagacattttttaaagctaaaatagtctttagtagtaacagtaactatgcgattattttcatcgatgatacatttcatcggcatattattacgcttaccatcaaagactataccatgtgtatatctaacgtattctagcatagttgccatacgcgcattaaacttttcaggatctttggatagatcttccaatctatctatttgagaaaacatttttatcatgttcaatagttgaaacgtcggatccactatatagatattatctataaagattttaggaactacgttcatggtatcctggcgaatattaaaactatcaatgatatgattatcgttttcatcttttatcaccatatagtttctaagatatgggattttacttaatataatattatttcccgtgataaattttattagaaaggccaaatctataagaaaagtcctagaattagtctgaagaatatctatatcgccgtatagtatatttggattaattagatatagagaatatgatccgtaacatatacaacttttattatggcgtctaagatattcttccatcaacttattaacatttttgactagggaagatacattatgacgtcccattacttttgccttgtctattactgcgacgttcatagaatttagcatatctcttgccaattcttccattgatgttacattataagaaattttagatgaaattacatttggagctttaatagtaagaactcctaatatgtccgtgtatgtggtcactaatacagattgtagttctataatcgtaaataatttacctatattatatgtttgagtctgtttagaaaagtagctaagtatacgatcttttatttctgatgcagatgtatcaacatcggaaaaaaatctttttttattcttttttactaaagatacaaatatgtctttgttaaaaacagttattttctgaatatttctagcttgtaattttaacatatgatattcgttcacactaggtactctgcctaaataggtttctataatctttaatgtaatattaggaaaagtattctgatcaggattcctattcattttgaggatttaaaactctgattattgtctaatatggtctctacgcaaactttttcacagagcgatagagtttttgataactcgtttttcttaagaaatataaaactactgtctccagagctcgctctatcttttattttatctaattcgatacaaactcctgatactggttcagaaagtaattcattaattttcagtcctttatagaagatatttaatatagataatacaaaatcttcagtttttgatatcgatctgattgatcctagaactagatatattaataacgtgctcattaggcagtttatggcagcttgataattagatatagtatattccagttcatatttattagataccgcattgcccagattttgatattctatgaattcctctgaaaataaatccaaaataactagacattctattttttgtggattagtgtactctcttccctctatcatgttcactactggtgtccacgatgataaatatctagagggaatataatatagtccataggatgccaatctagcaatgtcgaataactgtaattttattcttcgctcttcattatgaattgattcttgaggtataaacctaacacaaattatattattagacttttcgtatgtaatgtctttcatgttataagtttttaatcctggaatagaatctattttaatgaggcttttaaacgcagagttctccaacgagtcaaagcataatactctgttgtttttcttatatacgatgttacgattttcttctttgaatggaataggtttttgaattagtttataattacaacataatagataaggaagtgtgcaaatagtacgcggaaaaaacataatagctcccctgttttcatccatggttttaagtaaatgatcactggcttctttagtcaatggatattcgaacattaaccgtttcatcatcattggacagaatccatatttcttaatgtaaagagtgatcaaatcattgtgtttattgtaccatcttgttgtaaatgtgtattcggttatcggatctgctcctttttctattaaagtatcgatgtcaatctcgtctaagaattcaactatatcgacatatttcatttgtatacacataaccattactaacgtagaatgtataggaagagatgtaacgggaacagggtttgttgattcgcaaactattctaatacataattcttctgttaatacgtcttgcacgtaatctattatagatgccaagatatctatataattattttgtaagatgatgttaactatgtgatctatataagtagtgtaataattcatgtattttgatatatgttccaactctgtctttgtgatgtctagtttcgtaatatctatagcatcctcaaaaaatatattcgcatatattcccaagtcttcagttctatcttctaaaaaatcttcaacgtatggaatataataatctattttacctcttctgatatcattaatgatatagtttttgacactatcttctgtcaattgattcttattcactatatctaagaaacggatagcgtccctaggacgaactactgccattaatatctctattatagcttctggacataattcatctattataccagaattaatgggaactattccgtatctatctaacatagttttaagaaagtcagaatctaagacctgatgttcatatattggttcatacatgaaatgatctctattgatgatagtgactatttcattctctgaaaattggtaactcattctatatatgctttccttgttgatgaaggatagaatatactcaatagaatttgtaccaacaaactgttctcttatgaatcgtatatcatcatctgaaataatcatgtaaggcatacatttaacaattagagacttgtctcctgttatcaatatactattcttgtgataatttatgtgtgaggcaaatttgtccacgttctttaattttgttatagtagatatcaaatccaatggagctacagttcttggcttaaacagatatagtttttctggaacaaattctacaacattattataaaggactttgggtagataagtgggatgaaatcctattttaattaatgcgatagccttgtcctcgtgcagatatccaaacgcttttgtgatagtatggcattcattgtctagaaacgctctacgaatatctgtgacagatatcatctttagagaatatactagtcgcgttaatagtactacaatttgtattttttaatctatctcaataaaaaaattaatatgtatgattcaatgtataactaaactactaactgttattgataactagaatcagaatctaatgatgacgtacccaagaagtttatctactgccaatttagctgcattatttttagcatctcgtttagattttccatctgccttatcgaatactcttccgtcgatatctacacaggcataaaatgtaggagagttactaggcccaactgattcaatacgaaaagaccaatctctcttagttatttggcagtactcattaataacggtgacagggttagcatctttccaatcaataatttttttagccggaataacatcatcaaaagacttatgatcctctctcattgatttttcgcgggatacatcatctattatgacgtcagccataacatcagcatccggcttatccgcctccgttgtcataaaccaacgaggaggaatatcgtcggagctgtacaccatagcactacgttgaagatcgtacagagctttattaacttctcgcttctccatattaagttgtctagttagttgtgcagcagtagctccttcgattccaatggttttaatagcctcacacacaatctctgcgttagaacgttcgtcgatatagattttagacatttttagagagaactaacacaaccagcaataaaactgaacctactttatcatttttttattcatcatcctctggtggttcgtcgttcctatcaaatgtagctctgattaacccgtcatctataggtgatgctggttctggagattctggaggagatggattattatctggaagaatctctgttatttccttgttttcatgtatcgattgcgttgtaacattaagattgcgaaatgctctaaatttgggaggcttaaagtgttgtttgcaatctctacacgcgtgtctaactagtggaggttcgtcagctgctctagtttgaatcatcatcggcgtagtattcctacttttacagttaggacacggtgtattgtatttctcgtcgagaacgttaaaataatcgttgtaactcacatcctttattttatctatattgtattctactcctttcttaatgcattttataccgaataagagatagcgaaggaattctttttcggtgccgctagtacccttaatcatatcacatagtgttttatattccaaatttgtggcaatagacggtttatttctatacgatagtttgtttctggaatcctttgagtattctataccaatattattctttgattcgaatttagtttcttcgatattagattttgtattacctatattcttgatgtagtactttgatgatttttccatggcccattctattaagtcttccaagttggcatcatccacatattgtgatagtaattctcggatatcagtagcggctaccgccattgatgtttgttcattggatgagtaactactaatgtatacattttccatttataacacttatgtattaactttgttcatttatattttttcattattatgttgatattaacaaaagtgaatatatatatgttaataattgtattgtggttatacggctacaattttataatgagtgaaagtcagtgtccgatgatcaatgacgatagctttactctgaaaagaaagtatcaaatcgatagtgcggagtcaacaataaaaatggataagaagaggataaagtttcagaatagagccaaaatggtaaaagaaataaatcagacaataagagcagcacaaactcattacgagacattgaaactaggatacataaaatttaagagaatgattaggactactactctagaagatatagcaccatctattccaaataatcagaaaacttataaactattctcggacatttcagccatcggcaaagcatcacagaatccgagtaagatggtatatgctctgctgctttacatgtttcccaatttgtttggagatgatcatagattcattcgttatagaatgcatccaatgagtaaaatcaaacacaagatcttctctcctttcaaacttaatcttattagaatattagtggaagaaagattctataataatgaatgcagatctaataaatggaaaataattggaacacaagttgataaaatgttgatagctgaatctgataaatatacaatagatgcaaggtataacctaaaacccatgtatagaatcaagggagaatctgaagaagataccctcttcatcaaacagatggtagaacaatgtgtgacatcccaggaattggtggaaaaagtgttgaagatactgtttagagatttgttcaagagtggagaatacaaagcgtacagatacgatgatgatgtagaaaatggattcattggattggatacactaaaattaaacattgttcatgatatagttgaaccatgtatgcctgttcgtaggccagtggctaagatactgtgtaaagaaatggtaaataaatactttgagaatccgctacatattattggtaaaaatcttcaagagtgcattgactttgttagtgaataggcatttcatctttctccaatactaattcaaattgttaaattaataatggatagtataaatagttattagttataagatagtaaaaataattattagaataagagtgtagtatcatagataactctcttctataaaaatggattttattcgtagaaagtatcttatatacacagtagaaaataatatagattttttaaaggatgatacattaagtaaagtaaacaattttaccctcaatcatgtactagctctcaagtatctagttagcaattttcctcaacacgttattactaaggatgtattagctaataccaatttttttgttttcatacatatggtacgatgttgtaaagtgtacgaagcggttttacgacacgcatttgatgcacccacgttgtacgttaaagcattgactaagaattatttatcgtttagtaacacaatacaatcgtacaaggaaaccgtgcataaactaacacaagatgaaaaatttttagaggttgccgaatacatggacgaattaggagaacttataggcgtaaattatgacttagttcttaatccattatttcacggaggggaacccatcaaagatatggaaatcatttttttaaaactgtttaagaaaacagacttcaaagttgttaaaaaattaagtgttataagattacttatttgggcatacctaagcaagaaagatacaggcatagagtttgcggataatgatagacaagatatatatactctatttcaacaaactggtagaatcgtccatagcaatctaacagaaacgtttagagattatatctttcccggagataagactagctattgggtgtggttaaacgaaagtatagctaatgatgcggatattgttcttaatagacacgccattaccatgtatgataaaattcttagttatatatactctgagataaaacaaggacgcgttaataaaaacatgcttaagttagtttatatctttgagcctgaaaaagatatcagagaacttctgctagaaatcatatatgatattcctggagatatcctatctattattgatgcaaaaaacgacgattggaaaaaatattttattagtttttataaagctaattttattaacggtaatacatttattagtgatagaacgtttaacgaggacttattcagagttgttgttcaaatagatcccgaatatttcgataatgaacgaattatgtctttattctctacgagtgctgcggacattaaacgatttgatgagttagatattaataacagttatatatctaatataatttatgaggtgaacgatatcacattagatacaatggatgatatgaagaagtgtcaaatctttaacgaggatacgtcgtattatgttaaggaatacaatacatacctgtttttgcacgagtcggatcccatggtcatagagaacggaatactaaagaaactgtcatctataaaatccaagagtagacggctgaacttgtttagcaaaaacattttaaaatattatttagacggacaattggctcgtctaggtcttgtgttagatgattataaaggagacttgttagttaaaatgataaaccatcttaagtctgtggaggatgtatccgcattcgttcgattttctacagataaaaaccctagtattcttccatcgctaatcaaaactattttagctagttataatatttccatcatcgtcttatttcaaaggtttttgagagataatctatatcatgtagaagaattcttggataaaagcatccatctaaccaagacggataagaaatatatacttcaattgataagacacggtagatcatagaacagaccaaatatattattaataatttgtatatacatagatataattatcacacatttttgataaatgggaactgctgcaacaattcagactcccaccaaattaatgaataaagaaaatgcagaaatgattttggaaaaaattgttgatcatatagttatgtatattagtgacgaatcaagtgattcagaaaataatcctgaatatattgattttcgtaacagatacgaagactatagatctctcattataaaaagtgatcacgagtttgtaaagctatgtaaaaatcatgcggagaaaagttctccagaaacgcaacaaatgattatcaaacacatatacgaacaatatcttattccagtatctgaagtactattaaaacctataatgtccatgggtgacataattacatataacggatgtaaagacaatgaatggatgctagaacaactctctaccctaaactttaacaatctccgcacatggaactcatgtagcataggcaatgtaacgcgtctgttttatacattttttagttatctgatgaaagataaactaaatatataagtataatcccattctaatactttaacctgatgtattagcatcttattagaatattaacctaactaaaagacataacataaaaactcattacatagttgataaaaagcggtaggatataaatattatggctgccaccgttccgcgttttgacgacgtgtacaaaaatgcacaaagaagaattctagatcaagaaacattttttagtagaggtctaagtagaccgttaatgaaaaacacatatctatttgataattacgcgtatggatggataccagaaactgcaatttggagtagtagatacgcaaacttagatgcaagtgactattatcccatttcgttgggattacttaaaaagttcgagtttctcatgtctctatataaaggtcctattccagtatacgaagaaaaagtaaatactgaattcattgctaatggatctttctccggtagatacgtatcatatcttagaaagttttctgctcttccaacaaacgagtttattagttttttgttactgacttccattccaatctataatatcttgttctggtttaaaaatactcagtttgatattactaaacacacattattcagatacgtctatacagataatgccaaacacctggcgttggctaggtatatgtatcaaacaggagactataagcctttgtttagtcgtctcaaagagaattatatatttaccggtcccgttccaatatgtatcaaagatatagatcaccctaatcttagtagagcaagaagtccatccgattatgagacattagctaatattagtactatattgtactttaccaagtatgatccggtattaatgtttttattgttttacgtacctgggtattcaattactacaaaaattactccagccgtagaatatctaatggataaactgaatctaacaaagagcgacgtacaactgttgtaaattattttatgcttcgtaaaatgtaggttttgaaccaaacattctttcaaagaatgagatgcataaaactttattatccaatagattgactatttcggacgtcaatcgtttaaagtaaacttcgtaaaatattctttgatcactgccgagtttaaaacttctatcgataattgtttcatatgttttaatatttacaagttttttggtccatggtccattaggacaaatatatgcaaaataatatcgttctccaagttctatagtctctggattatttttattatattcagtaaccaaatacatattagggttatctgcggatttataatttgagtgatgcattcgactcaacataaataattctagaggagacgatctactatcaaattcggatcgtaaatctgtttctaaagaacggagaatatctatacatacctgattagaattcatccgtccttcagacaacatctcagacagtctggtcttgtatgtcttaatcatattcttatgaaacttggaaacatctcttctagtttcactagtacctttattaattctctcaggtacagattttgaattcgacgatgctgagtatttcatcgttgtatatttcttcttcgattgcataatcagattcttatataccgcctcaaactctattttaaaattattaaacaatactctattattaatcagtcgttctaactctttcgctatttctatagacttatctacatcttgactgtctatctctgtaaacacggagtcggtatctccatacacgctacgaaaacgaaatctgtaatctataggcaacgatgttttcacaatcggattaatatctctatcgtccatataaaatggattacttaatggattggcaaaccgtaacataccgttagataactctgctccatttagtaccgattctagatacaagatcattctacgtcctatggatgtgcaactcttagccgaagcgtatgagtatagagcactatttctaaatcccatcagaccatatactgagttggctactatcttgtacgtatattgcatggaatcatagatggccttttcagttgaactggtagcctgttttagcatctttttatatctggctctctctgccaaaaatgttcttaatagtctaggaatggttccttctatcgatctatcgaaaattgctatttcagagatgaggttcggtagtctaggttcacaatgaaccgtaatatatctaggaggtggatatttctgaagcaatagctgattatttatttcttcttccaatctattggtactaacaacgacaccgactaatgtttccggagatagatttccaaagatacacacattaggatacagactgttataatcaaagattaatacattattactaaacattttttgttttggagcaaataccttaccgccttcataaggaaacttttgttttgtttctgatctaactaagatagttttagtttccaacaatagctttaacagtggacccttgatgactgtactcgctctatattcgaataccatggattgaggaagcacatatgttgacgcacccgcgtctgtttttgtttctactccataatactcccacaaatactgacacaaacaagcatcatgaatacagtatctagccatatctaaagctatgtttagattataatccttatacatctgagctaaatcaacgtcatcctttccgaaagataatttatatgtatcattaggtaaagtaggacataatagtacgactttaaatccattttcccaaatatctttacgaattactttacatataatatcctcatcaacagtcacataattacctgtggttaaaacctttgcaaatgcagcggctttgcctttcgcgtctgtagtatcgtcaccgatgaacgtcatttctctaactcctctatttaatactttacccatgcaactgaacgcgttcttggatatagaatccaatttgtacgaatccaatttttcaaatttttgaatgaatgaatatagatcgaaaaatatagttccattattgttattaacgtgaaacgtagtattggccatgccgcctactcccttatgactagactgatttctctcataaatacagagatgtacagcttcctttttgtccggagatctaaagataatcttctctcctgttaataactctagacgattagtaatatatctcagatcaaagttatgtccgttaaaggtaacgacgtagtcgaacgttagttccaacaattgtttagctattcgtaacaaaactatttcagaacatagaactagttctcgttcgtaatccatttccattagtgactgtatcctcaaacatcctctatcgacggcttcttgtatttcctgttccgttaacatctcttcattaatgagcgtaaacaataatcgtttaccacttaaatcgatataacagtaacttgtatgcgagattgggttaataaatacagaaggaaacttcttatcgaagtgacactctatatctagaaataagtacgatcttgggatatcgaatctaggtatttttttagcgaaacagttacgtggatcgtcacaatgataacatccattgttaatctttgtcaaatattgctcgtccaacgagtaacatccgtctggagatatcccgttagaaatataaaaccaactaatattgagaaattcatccatggtggcattttgtatgctgcgtttctttggctcttctatcaaccacatatctgcgacggagcattttctatctttaatatctagattataacttattgtctcgtcaatgtctatagttctcatctttcccaacggcctcgcattaaatggaggaggagacaatgactgatatatttcgtccgtcactacgtaataaaagtaatgaggaaatcgtataaatacggtctcaccatttcgacatctggatttcagatataaaaatctgttttcaccgtgactttcaaaccaattaatgcaccgaacatccatttatagaatttagaaatatattttcatttaaatgaatcccaaacattggggaagagccgtatggaccattatttttatagtactttcgcaagcgggtttagacggcaacatagaagcgtgtaaacgaaaactatatactatagttagcactcttccatgtcctgcatgtagacggcacgcgactatcgctatagaggacaataatgtcatgtctagcgatgatctgaattatatttattattttttcatcagattatttaacaatttggcatctgatcccaaatacgcgatcgatgtgacaaaggttaaccctttataaacttaacccattataaaacttatgattagtcacaactgaaataaccgcgtgattattttttggtataattctacacggcatggtttctgtgactatgaattcaacccccgttacattagtgaaatctttaacaaacagcaagggttcgtcaaagacataaaactcattgtttacaatcgaaatagaccccctatcacacttaaaataaaaaatatccttatcctttaccaccaaataaaattctgattggtcaatgtgaatgtattcacttaacagttccacaaatttatttattaactccgaggcacatacatcgtcggtattttttatggcaaactttactcttccagcatccgtttctaaaaaaatattaacgagttccatttatatcatccaatattattgaaatgacgttgatggacagatgatacaaataagaaggtacggtacctttgtccaccatctcctccaattcatgctctattttgtcattaactttaatgtatgaaaacagtacgccacatgcttccatgacagtgtgtaacactttggatacaaaatgtttgacattagtataattgttcaagactgtcaatctataatagatagtagctataatatattctatgatggtattgaagaagatgacaaccttggcatattgatcatttaacacagacatggtatcaacagatagcttgaatgaaagagaatcagtaattggaataagcgtcttctcgatagagtgtccgtataccaacatgtctgatattttgatgtattccattaaattatttagttttttctttttattctcgttaaacagcatttctgtcaacggaccccaacatcgttgaccgattaagttttgattgatttttccgtgtaaggcgtatctagtcagatcgtatagcctatccaataatccatcatctgtgcgtagatcacatcgtacactttttaattctctatagaagagcgacagacatctggagcaattacagacagcaatttctttattctctacagatgtaagatacttgaagacattcctatgatgatgcagaattttggataacacggtattgatggtatctgttaccataattcctttgatggctgatagtgtcagagcacaagatttccaatctttgacaatttttagcaccattatctttgttttgatatctatatcagacagcatggtgcgtctgacaacacagggattaagacggaaagatgaaatgattctctcaacatcttcaatagataccttgctattttttctggcattatctatatgtgcgagaatatcctctagagaatcagtatcctttttgatgatagtggatctcaatgacatgggacgtttaaaccttcttattctatcaccagattgcatggtgatttgtcttctttcttttatcataatgtaatctctaaattcatcggcaaattgtctatatctaaaatcataatatgagatgtttacctctacaaatatctgttcgtccaatgttagagtatttacatcagttttgtattccaaattaaacatggcaacggatttaattttatattcctctattaagtcctcgtcgataataacagaatgtagataatcatttaatccatcgtacatggttggaagatgcttgttgacaaaatctttaattgtcttgatgaaggtgggactatatctaacatcttgattaataaaatttataacattgtccataggatactttgtaactagttttatacacatctcttcatcggtaagtttagacagaatatcgtgaacaggtggtatattatattcatcagatatacgaagaacaatgtccaaatctatattgtttaatatattatatagatgtagcgtagctcctacaggaatatctttaactaagtcaatgatttcatcaaccgttagatctattttaaagttaatcatataggcattgatttttaaaaggtatgtagccttgactacattctcattaattaaccattccaagtcactgtgtgtaagaagattatattctatcataagcttgactacatttggtcccgataccattaaagaattcttatgatataaggaaacagcttttaggtactcatctactctacaagaattttggagagccttaacgatatcagtgacgtttattatttcaggaggaaaaaacctaacattgagaatatcggaattaatagcttccagatacagtgattttggcaatagtccgtgtaatccataatccagtaacacgagctggtgcttgctagacaccttttcaatgtttaatttttttgaaataagctttgataaagccttcctcgcaaattccggatacatgaacatgtcggcgacatgattaagtattgttttttcattatttttatattttctcaacaagttctcaataccccaatagatgatagaatatcacccaatgcgtccatgttgtctatttccaacaggtcgctatatccaccaatagaagtttttccaaaaaagattctaggaacagttctaccaccagtaatttgttcaaaataatcccgcaattcattttcgggtttaaattctttaatatcgacaatttcatacgctcctcttttgaaactaaacttatttagaatatccagtgcatttctacaaaaaggacatgtatacttgacaaaaattgtcactttgttattggccaacctttgttgtacaaattcctcggccattttaatatttaagtgatataaaactatctcgacttatttaactctttagtcgagatatatggacgcagatagctatatgatagccaactacagaaggcaaacgctataaaaaacataattacgacgagcatatttataaatatttttattcagcattacttgatatagtaatattaggcacagtcaaacattcaaccactctcgatacattaactctctcattttctttaacaaattctgcaatatcttcgtaaaaagattcttgaaactttttagaatatctatcgactctagatgaaatagcgttcgtcaacatactatgttttgtatacataaaggcgcccattttaacagtttctagtgacaaaatgctagcgatcctaggatcctttagaatcacatagattgacgattcgtctctcttagtaactctagtaaaataatcatacaatctagtacgcgaaataatattatccttgacttgaggagatctaaacaatctagttttgagaacatcgataagttcatcgggaatgacatacatactatctttaatagaactcttttcatccagttgaatggattcgtccttaaccaactgattaatgagatcttctattttatcattttccagatgatatgtatgtccattaaagttaaattgtgtagcgcttctttttagtctagcagccaatactttaacatcactaatatcgatatacaaaggagatgatttatctatggtattaagaattcgtttttcgacatccgtcaaaaccaattcctttttgcctgtatcatccagttttccatcctttgtaaagaaattattttctactagactattaataagactgataaggattcctccataattgcacaatccaaactttttcacaaaactagactttacaagatctacaggaatgcgtacttcaggttttttagcttgtgattttttcttttgcggacattttcttgtgaccaactcatctaccatttcattgattttagcagtgaaataagctttcaatgcacgggcactgatactattgaaaacgagttgatcttcaaattccgccatttaagttcaccaaacaacttttaaatacaaatatatcaatagtagtagaataagaactataaaaaaaataataattaaccaataccaaccccaacaaccggtattattagttgatgtgactgttttctcatcacttagaacagatttaacaatttctataaagtctgtcaaatcatcttccggagaccccataaatacaccaaatatagcggcgtacaacttatccatttatacattgaatattggcttttctttatcgctatcttcatcatattcatcatcaatatcaacaagtcccagattacgagccagatcttcttctacattttcagtcattgatacacgttcactatctccagagagtccgataacgttagccaccacttctctatcaatgattagtttcttgagcgcgaaagtaatttttgtttccgttccggatctatagaagacgataggtgtgataattgccttggccaattgtctttctcttttactgagtgattctagttcaccttctatagatctgagaatggatgattctccagtcgaaacatattctaccatggatccgtttaatttgttgatgaagatggattcatccttaaatgttttctctgtaatagtttccaccgaaagactatgcaaagaatttggaatgcgttccttgtgcttaatgtttccatagacggcttctagaagttgatacaacataggactagccgcggtaacttttatttttagaaagtatccatcgcttctatcttgtttagatttatttttataaagtttagtctctccttccaacataataaaagtggaagtcatttgactagataaactatcagtaagttttatagagatagacgaacaattagcgtattgagaagcatttagtgtaacgtattcgatacattttgcattagatttactaatcgattttgcatactctataacacccgcacaagtctgtagagaatcgctagatgcagtaggtcttggtgaagtttcaactctcttcttgattaccttactcatgattaaacctaaataattgtactttgtaatataatgatatatattttcactttatctcatttgagaataaaaatgtttttgtttaaccactgcatgatgtacagatttcggaatcgcaaaccaccagtggttttattttatccttgtccaatgtgaattgaatgggagcggatgcgggtttcgtacgtagatagtacattcccgtttttagaccgagactccatccgtaaaaatgcatactcgttagtttggaataactcggatctgctatatggatattcatagattgactttgatcgatgaaggctcccctgtctgcagccatttttatgatcgtcttttgtggaatttcccaaatagttttataaactcgcttaatatcttctggaaggtttgtattctgaatggatccaccatctgccataatcctattcttgatctcatcattccataattttctctcggttaaaactctaaggagatgcggattaactacttgaaattctccagacaatactctccgagtgtaaatattactggtatacggttccaccgactcattatttcccaaaatttgagcagttgatgcagtcggcataggtgccaccaataaactatttctaagaccgtatgttctgattttatcttttagaggttcccaattccaaagatccgacggtacaacattccaaagatcatattgtagaataccgttactggcgtacgatcctacatatgtatcgtatggtccttccttctcagctagttcacaactcgcctctaatgcaccgtaataaatggtttcgaagatcttcttatttagatcttgtgcttccaggctatcaaatggataatttaagagaataaacgcgtccgctaatccttgaacaccaataccgataggtctatgtctcttattagagatttcagcttctggaataggataataattaatatctataattttattgagatttctgacaattactttgaccacatccttcagtttgagaaaatcaaatcgcccatctattacaaacatgttcaaggcaacagatgccagattacaaacggctacctcattagcatccgcatattgtattatctcagtgcaaagattactacacttgatagttcctaaattttgttgattactctttttgttacacgcatccttataaagaatgaatggagtaccagtttcaatctgagattctataatcgctttccagacgactcgagcctttattatagatttgtatctcctttctctttcgtatagtgtatacaatcgttcgaactcgtctccccaaacattgtccaatccaggacattcatccggacacatcaacgaccactctccgtcatccttcactcgtttcataaagagatcaggaatccaaagagctataaatagatctctggttctatgttcctcgtttcctgtattctttttaagatcgaggaacgccataatatcagaatgccacggttccaagtatatggccataactccaggccgtttgtttcctccctgatctatgtatctagcggtgttattataaactctcaacattggaataataccgtttgatataccattggtaccggagatatagcttccactggcacgaatattactaattgatagacctattccccctgccattttagagattaatgcgcatcgttttaacgtgtcatagataccctctatgctatcatcgatcatgttaagtagaaaacagctagacatttggtgacgactagttcccgcattaaataaggtaggagaagcgtgcgtaaaccatttttcagaaagtagattgtacgtctcaatagctgagtctatatcccattgatgaattcctactgcgacacgcattaacatgtgctgaggtctttcaacgatcttgttgtttattttcaacaagtaggatttttccaaagttttaaaaccaaaatagttgtatgaaaagtctcgttcgtaaataataaccgagttgagtttatccttatatttgttaactatatccatggtgatacttgaaataatcggagaatgtttcccatttttaggattaacatagttgaataaatcctccatcacttcactaaatagtttttttgtttccttgtgtagatttgatacggctattctggcggctagaatggcataatccggatgttgtgtagtacaagtggctgctatttcggctgccagagtgtccaattctaccgttgttactccattatatattccttgaataaccttcatagctattttaataggatctatatgatccgtgtttaagccataacataattttctaatacgagacgtgattttatcaaacatgacattttccttgtatccatttcgtttaatgacaaacatttttgttggtgtaataaaaaaattatttaacttttcattaatagggatttgacgtatgtagcgtacaaaatgatcgttcctggtatatagataaagagtcctatatatttgaaaatcgttacggctcgattaaactttaatgattgcatagtgaatatatcattaggatttaactccttgactatcatggcggcgccagaaattaccatcaaaagcattaatacagttatgccgatcgcagttaaaacggttatagcatccaccatttatatctaaaaattagatcaaagaatatgtgacaaagtcctagttgtatactgagaattgacgaaacaatgtttcttacatatttttttcttattagtaactgacttaatagtaggaactggaaagctagacttgattattctataagtatagatacccttccagataatgttctctttgataaaagttccagaaaatgtagaattttttaaaaagttatcttttgctattaccaagattgtgtttagacgcttattattaatatgagtgatgaaatccacaccgcctctagatatcgcctttatttccacattagatggtaaatccaatagtgaaactatctttttaggaatgtatggactcgcgtttagaggagtgaacgtcttgggcgtcggaaaggatgattcgtcaaacgaataaacaatttcacaaatggatgttaatgtattagtaggaaattttttgacgctagtggaattgaagattctaatggatgatgttctacctatttcatccgataacatgttaatttccgacaccaacggttttaatatttcgatgatatacggtagtctctctttcggacttatatagcttattccacaatacgagtcattatatactccaaaaaacaaaataactagtataaaatctgtatcgaatgggaaaaacgaaattatcgacataggtatagaatccggaacattgaacgtattaatacttaattctttttctgtggtaagtaccgataggttattgacattgtatggttttaaatattctataacttgagacttgatagatattagtgatgaattgaaaattatttttatcaccacgtgtgtttcaggatcatcgtcgacgcccgtcaaccaaccgaatggagtaaaataaatatcattaatatatgctctagatattagtatttttattaatcctttgattatcatcttctcgtaggcgaatgattccatgatcaagagtgatttgagaacatcctccggagtattaatgggcttagtaaacagtccatcgttgcaataataaaagttatccaagttaaaggatattatgcattcgtttaaagatatcacctcatctgacggagacaattttttggtaggttttagagactttgaagctacttgtttaacaaagttattcatcgtcgtctactattctatttaattttgtagttaatttatcacatatcacattaattgactttttggtccatttttccatacgtttatattcttttaatcctgcgttatccgtttccgttatatccagggatagatcttgcaagttaaatagaatgctcttaaataatgtcattttcttatccgctaaaaatttaaagaatgtataaacctttttcagagatttgaaactcttaggtggtgtcctagtacacaatatcataaacaaactaataaacattccacattcagattccaacagctgattaacttccacattaatacagcctattttcgctccaaatgtacattcgaaaaatctgaataaaacatcgatgtcacaatttgtattatccaatacagaatgtttgtgattcgtgttaaaaccatcggagaaggaatagaaataaaaattattatagtggtggaattcagttggaatattgcctccggagtcataaaaggatactaaacattgttttttatcataaattacacatttccaatgagacaaataacaaaatccaaacattacaaatctagaggtagaacttttaattttgtctttaagtatatacgataagatatgtttattcataaacgcgtcaaatttttcatgaatcgctaaggagtttaagaatctcatgtcaaattgtcctatataatccacttcggatccataagcaaactgagagactaagttcttaatacttcgattgctcatccaggctcctctctcaggctctattttcatcttgacgacctttggattttcaccagtatgtattcctttacgtgataaatcatcgattttcaaatccatttgtgagaagtctatcgccttagatactttttcccgtagtcgaggtttaaaaaaatacgctaacggtatactagtaggtaactcaaagacatcatatatagaatggtaacgcgtctttaactcgtcggttaactctttcttttgatcgagttcgtcgctactattgggtctgctcaggtgccccgactctactagttccaacatcataccgataggaatacaagacactttgccggcggttgtagatttatcatatttttccactacatatccgttacaatttgttaaaaatttagatacatctatattgctacataatccagctagtgaatatatatgacataataaattggtaaatcctagttctggtattttactaattactaaatctgtatatctttccatttatcatggaaaagaatttaccagatatcttcttttttccaaactgcgttaatgtattctcttacaaatattcacaagatgaattcagtaatatgagtaaaacggaacgtgatagtttctcattggccgtgtttccagttataaaacatagatggcataacgcacacgttgtaaaacataaaggaatatacaaagttagtacagaagcacgtggaaaaaaagtatctcctccatcactaggaaaacccgcacacataaacctaaccgcgaagcaatatatatacagtgaacacacaataagctttgaatgttatagttttctaaaatgtataacaaatacagaaatcaattcgttcgatgagtatatattaagaggactattagaagctggtaatagtttacagatattttccaattccgtaggtaaacgaacagatactataggtgtactagggaataagtatccatttagcaaaattccattggcctcattaactcctaaagcacaacgagagatattttcagcgtggatttctcatagacctgtagttttaactggaggaactggagtgggtaagacgtcacaggtacccaagttattgctttggtttaattatttatttggtggattctctactctagataaaatcactgactttcacgaaagaccagtcattctatctcttcctaggatagctttagttagattgcatagcaataccattttaaaatcattgggatttaaggtactagatggatctcctatttctttacggtacggatctataccggaagaattaataaacaaacaaccaaaaaaatatggaattgtattttctacccataagttatctctaacaaaactatttagttatggcactcttattatagacgaagttcatgagcatgatcaaataggagatattattatagcagtagcgagaaagcatcatacgaaaatagattctatgtttttaatgactgccacattagaggatgaccgagaacggctaaaagtatttttacctaatcccgcatttatacatattcctggagatacactgtttaaaattagcgaggtatttattcataataagataaatccatcttccagaatggcatacatagaagaagaaaagagaaatttagttactgctatacagatgtatactcctcctgatggatcatccggtatagtctttgtggcatccgttgcacagtgtcacgaatataaatcatatttagaaaaaagattaccgtatgatatgtatattattcatggtaaggtcttagatatagacgaaatattagaaaaagtgtattcatcacctaatgtatcgataattatttctactccttatttggaatccagcgttactatacgcaatgttacacacatttatgatatgggtagagtttttgtccccgctccttttggaggatcgcaacaatttatttctaaatctatgagagatcaacgaaaaggaagagtaggaagagttaatcctgggacatacgtctatttctatgatctgtcttatatgaagtctatacagcgaatagattcagaatttctacataattatatattgtacgctaataagtttaatctaacactccccgaagatttgtttataatccctacaaatttggatattctatggcgtacaaaggaatatatagactcgttcgatattagtacagaaacatggaataaattattatccaattattatatgaagatgatagagtatgctaaactttatgtactaagtcctattctcgctgaggagttggataactttgagaggacgggagaattaactagtattgtacgagaagccattttatctctaaatttacgaattaagattttaaattttaaacataaagatgatgatacgtatatacacttttgtaaaatattattcggtgtctataacggaacaaacgctactatatattatcatagacctctaacgggatatatgaatatgatttcagatactatatttgttcctgtagataataactaaaaatcaaactctaatgaccacatctttttttagagatgaaaaattttccacatctccttttgtagacacgactaaacattttgcagaaaaaagtttattagtgtttagataatcgtatacttcatcagtgtagatagtaaatgtgaacagataaaaggtattcttgctcaatagattggtaaattccatagaatatattaatcctttcttcttgagatcccacatcatttcaaccagagacgttttatccaatgatttacctcgtactataccacatacaaaactagattttgcagtgacgtcgtacctggtattcctaccaaacaaaattttacttttagttcttttagaaaattctaaggtagaatctctatttgccaatatgtcatctatggaattaccactagcaaaaaatgatagaaatatatattgatacatcgcagctggttttgatctactatactttaaaaacgaatcagattccataattgcctgtatatcatcagctgaaaaactatgttttacacgtattccttcggcatttctttttaatgatatatcttgtttagacaatgataaagttatcatgtccatgagagacgcgtctccgtatcgtataaatatttcattagatgttagacgcttcattaggggtatacttctataaggtttcttaatcagtccatcattggttgcgtcaagaactactatcggatgttgttgggtatctctagtgttacacatggccttactaaagtttgggtaaataactatgatatctctattaattatagatgcatatatttcattcgtcaaggatattagtatcgacttgctatcgtcattaatacgtgtaatgtaatcatataaatcatgcgatagccaaggaaaatttaaatagatgttcatcatataatcgtcgctataattcatattaatacgttgacattgactaatttgtaatatagcctcgccacgaagaaagctctcgtattcagtttcatcgataaaggataccgttaaatataactggttgccgatagtctcatagtctattaagtggtaagtttcgtacaaatacagaatccctaaaatattatctaatgttggattaatctttaccataactgtataaaatggagacggagtcataactattttaccgtttgtacttactggaatagatgaaggaataatctccggacatgctggtaaagacccaaatgtctgtttgaagaaatccaatgttccaggtcctaatctcttaacaaaaattacgatattcgatcccgatatcctttgcattctatttaccagcatatcacgaactatattaagattatctatcatgtctattctcccaccgttatataaatcgcctccgctaagaaacgttagtatatccatacaatggaatacttcatttctaaaatagtattcgttttctaattctttaatgtgaaatcgtatactagaaagggaaaaattatctttgagttttccgttagaaaagaaccacgaaactaatgttctgattgcgtccgattccgttgctgaattaatggatttacaccaaaaactcatataacttctagatgtagaagcattcgctaaaaaattagtagaatcaaaggatataagtagatgttccaacaagtgagcaattcccaagatttcatctatatcattctcgaatccgaaattagaaattcccaagtagatatcctttttcatccgatcgttgatgaaaatacgaactttattcggtaagacaatcatttactaaggagtaaaataggaagtaatgttcgtatgtcgttatcatcgtataaattaaaggtgtgttttttaccattaagtgacattataattttaccaatattggaattataatataggtgtatttgcgcactcgcgacggttgatgcatcggtaaatatagctgtatctaatgttctagtcggtatttcatcatttcgctgtctaataatagcgttttctctatctgtttccattacagctgcctgaagtttattggtcggataatatgtaaaataataagaaatacatacgaataacaaaaataaaataagatataataaagatgccatttagagatctaattttgttcaacttgtccaaattcctacttacagaagatgaggaatcgttggagatagtgtcttccttatgtagaggatttgaaatatcttatgatgacttgataacttactttccagataggaaataccataaatatatttataaagtatttgaacatgtagatttatcggaggaattaagtatggaattccatgatacaactctgagagatttagtctatcttagattgtacaagtattccaagtgtatacggccgtgttataaattaggagataatctaaaaggcatagttgttataaaggacaggaatatttatattagggaagcaaatgatgacttgatagaatatctcctcaaggaatacactcctcagatttatacatattctaatgagcgcgtccccataactggttcaaaattaattctttgtggattttctcaagttacatttatggcgtatacaacgtcgcatataacaacaaataaaaaggtagatgttctcgtttccaaaaaatgtatagatgaactagtcgatccaataaattatcaaatacttcaaaatttatttgataaaggaagcggaacaataaacaaaatactcaggaagatattttattcggtaacaggtggccaaactccataatttgctttttctatttcggattttagaatttccaaattcaccagcgatttatcggttttggtgaaatccaaggatttattaatgtccacaaatgccatttgttttgtctgtggattgtatttgaaaatggaaacgatgtagttagatagatgcgctgcaaagtttcctattagggttccgcgctttacgtcacccagcatacttgaatcaccatcctttaaaaaaaatgataagatatcaacatggagtatatcatactcggattttaattcttctactgcatcactgacattttcacaaatactacaatacggtttaccgaaaataatcagtacgttcttcatttatgggtatcaaaaacttaaaatcgttactgctggaaaataaatcactgacgatattagatgataatttatacaaagtatacaatggaatatttgtggatacaatgagtatttatatagccgtcgccaattgtgtcagaaacttagaagagttaactacggtattcataaaatacgtaaacggatgggtaaaaaagggagggcatgtaaccctttttatcgatagaggaagtataaaaattaaacaagacgttagagacaagagacgtaaatattctaaattaaccaaggacagaaaaatgttagaattagaaaagtgtacatccgaaatacaaaatgttaccggatttatggaagaagaaataaaggcagaaatgcaattaaaaatcgataaactcacatttcaaatatatttatctgattctgataacataaaaatatcattgaatgagatactaacacatttcaacaataatgagaatgttacattattttattgtgatgaacgagacgcagaattcgttatgtgtctcgaggctaaaacacatttctctaccacaggagaatggccgttgataataagtaccgatcaggatactatgctatttgcatctgctgataatcatcctaagatgataaaaaacttaactcaactgtttaaatttgttccctcggcagaggataactatttagcaaaattaacggcgttagtgaatggatgtgatttctttcctggactctatggggcatctataacacccaccaacttaaacaaaatacaattgtttagtgattttacaatcgataatatagtcactagtttggcaattaaaaattattatagaaagactaactctaccgtagacgtgcgtaatattgttacgtttataaacgattacgctaatttagacgatgtctactcgtatattcctccttgtcaatgcactgttcaagaatttatattttccgcattagatgaaaaatggaatgaatttaaatcatcttatttagagaccgttccgttaccctgtcaattaatgtacgcgttagaaccacgtaaggagattgatgtttcagaagttaaaactttatcatcttatatagatttcgaaaatactaaatcagatatcgatgttataaaatctatatcctcgatcttcggatattctaacgaaaactgtaacacgatagtattcggcatctataaggataatttactactgagtataaataattcattttactttaacgatagtctgttaataaccaatactaaaagtgataatataataaatataggttactagattaaaaatggtgttccaactcgtgtgctctacgtgcggcaaagatatttctcacgaacgatataaattgattatacgaaaaaaatcattaaaggatgtactcgtcagtgtaaagaacgaatgttgtaggttaaaattatctacacaaatagaacctcaacgtaacttaacagtgcaacctctattggatataaactaatatggatccggttaattttattaagacatatgcgcctagaggttctattatttttattaattataccatgtcattaacaagtcatttgaatccatcgatagaaaaacatgtgggtatttattatggtacgttattatcggaacacttggtagttgaatctacctatagaaaaggagttcgaatagtcccattggatagtttttttgaaggatatcttagtgcaaaagtatacatgttagagaatattcaagttatgaaaatagcagctgatacgtcattaactttattgggtattccgtatggatttggtcataatagaatgtattgttttaaattggtagctgaatgttataaaaatgccggtgttgaaacatcgtctaaacgaatattgggtaaaaatatttttctgagccaaaacttcacagacgataatagatggataaagatatatgattctaataatttaacattttggcaaattgattaccttaaagggtgagttaatatgcataactactcctccgttgttttttccctcgttctttttcttaacgttgtttgccatcactctcataatgtaaagatattctaaaatggtaaacttttgcatatcggacgcagaaattggtataaatgttgtaattgtattatttcccgtcaatggactagtcacagctccatcagttttatatcctttagagtatttctcactcgtgtctaacattctagagcattccatgatctgtttatcgttgatattggccggaaagatagattttttattttttattatattactattggcaattgtagatataacttctggtaaatatttttctaccttttcaatctcttctattttcaagccggctatatattctgctatattgttgctagtatcaataccttttcttgctaagaagtcatatgtggtattcactatatcagttttaactggtagttccattagcctttccacttctgcagaataatcagaaattggttctttaccagaaaatccagctactataataggctcaccgatgatcattggcaaaatcctatattgtaccagattaatgagagcatatttcatttccaataattctgctagttcttgagacattgatttatttgatgaatctagttggttctctagatactctaccatttctgccgcatacaataacttgttagataaaatcagggttatcaaagtgtttagcgtggctagaatagtgggcttgcatgtattaaagaatgcggtagtatgagtaaaccgttttaacgaattatatagtctccagaaatctgtggcgttacatacatgagccgaatgacatcgaagattgtccaatatttttaatagctgctctttgtccattatttctatatttgactcgcaacaattgtagataccattaatcaccgattcctttttcgatgctggacaatagcacaattgtttagctttggactctatgtattcagaattaatagatatatctctcaatacagattgcactatacattttgaaactatgtcaaaaattgtagaacgacgctgttctgcagccatttaactttaaataatttacaaaaatttaaaatgagcatccgtataaaaatcgataaactgcgccaaattgtggcatatttttcagagttcagtgaagaagtgtctataaatgtagactcgacggatgagttaatgtatatttttgccgccttgggcggatctgtaaacatttgggcaattatacctctaagtgcatcagtgttttaccgaggagccgaaaatattgtgtttaatcttcctgtgtccaaggtaaaatcgtgtttgtgtagttttcacaatgatgccatcatagatatagaacctgatctggaaaataatctagtaaaactttctagttatcatgtagtaagtgtcgattgtaacaaggaactgatgcctattaggacagatactactatttgtctaagtatagatcaaaagaaatcttacgtgtttaattttcacaagtatgaagaaaaatgttgtggtagaaccgtcattcatctagaatggttgttgggctttatcaagtgtattagtcagcatcagcatctggctattatgtttaaagatgacaatattattatgaagactcctggtaatactgatgcgttttccagggaatattctatgactgaatgttctcaagaactacaaaagttttctttcaaaatagctatctcgtctctcaacaaactacgaggattcaaaaagagagtcaatgtttttgaaactagaatcgtaatggataatgacgataacattttaggaatgttgttttcggatagagttcaatcctttaagatcaacatctttatggcgtttttagattaatactttcaatgagataaatatgggtggcggagtaagtgttgagctccctaaacgggatccgcctccgggagtacccactgatgagatgttattaaacgtggataaaatgcatgacgtgatagctcccgctaagcttttagaatatgtgcatataggaccactagcaaaagataaagaggataaagtaaagaaaagatatccagagtttagattagtcaacacaggacccggtggtctttcggcattgttaagacaatcgtataatggaaccgcacccaattgctgtcgcacttttaatcgtactcattattggaagaaggatggaaagatatcagataagtatgaagagggtgcagtattagaatcgtgttggccagacgttcacgacactggaaaatgcgatgttgatttattcgactggtgtcagggggatacgttcgatagaaacatatgccatcagtggatcggttcagcctttaataggagtaatagaactgtagagggtcaacaatcgttaataaatctgtataataagatgcaaacattatgtagtaaagatgctagtgtaccaatatgcgaatcatttttgcattatttacgcgcacacaatacagaagatagcaaagagatgatcgattatattctaagacaacagtctgcggactttaaacagaaatatatgagatgtagttatcccactagagataagttagaagagtcattaaaatatgcggaacctcgagaatgttgggatccagagtgttcgaatgccaatgttaatttcttactaacacgtaattataataatttaggactttgcaatattgtacgatgtaataccagcgtgaacaacttacagatggataaaacttcctcattaagattgtcatgtggattaagcaatagtgatagattttctactgttcccgtcaatagagcaaaagtagttcaacataatattaaacactcgttcgacctaaaattgcatttgatcagtttattatctctcttggtaatatggatactaattgtagctatttaaatgggtgccgcggcaagcatacagacgacggtgaatacactcagcgaacgtatctcgtctaaattagaacaagaagcgaacgctagtgctcaaacaaaatgtgatatagaaatcggaaatttttatatccgacaaaaccatggatgtaacctcactgttaaaaatatgtgctctgcggacgcggatgctcagttggatgctgtgttatcagccgctacagaaacatatagtggattaacaccggaacaaaaagcatacgtgccagctatgtttactgctgcgttaaacattcagacgagtgtaaacactgttgttagagattttgaaaattatgtgaaacagacttgtaattctagcgcggtcgtcgataacaaattaaagatacaaaacgtaatcatagatgaatgttacggagccccaggatctccaacaaatttggaatttattaatacaggatctagcaaaggaaattgtgccattaaagcgttgatgcaattgacgactaaggccactactcaaatagcacctagacaagttgctggtacaggagttcagttttatatgattgttatcggtgttataatattggcagcgttgtttatgtactatgccaagcgtatgttgttcacatccaccaatgataaaatcaaacttattttagccaataaggaaaacgtccattggactacttacatggacacattctttagaacttctccgatggttattgctaccacggatatgcaaaactgaaaatatattgataatattttaatagattaacatggaagttatcgctgatcgtctagacgatatagtgaaacaaaatatagcggatgaaaaatttgtagattttgttatacacggtctagagcatcaatgtcctgctatacttcgaccattaattaggttgtttattgatatactattatttgttatagtaatttatatttttacggtacgtctagtaagtagaaattatcaaatgttgttggtggtgctagtcatcacattaactattttttattactttatactataatagtactagactgacttctaacaaacatctcacctgccataaataaatgcttgatattaaagtcttctatttctaacactattccatctgtggaaaataatactctgacattatcgctaattgacacatcggtgagtgatatgcctataaagtaataatcttctttgggcacatataccagtgtaccaggttctaacaacctatttactggtgctcctgtagcatactttttctttaccttgagaatatccatcgtttgcttggtcaatagcgatatgtgattttttatcaaccactcaaaaaagtaattggagtgttcatatcctctacgggctattgtctcatggccgtgtatgaaatttaagtaacacgactgtggtagatttgttctatagagccgattgccgcaaatagatagaactaccaatatgtctgtacaaatgttaaacattaattgattaacagaaaaaacaatgttcgttctgggaatagaaaccagatcaaaacaaaattcgttagaatatatgccacgtttatacatggaatataaaataactacagtttgaaaaataacagtatcatttaaacatttaacttgcggggttaatctcacaactttactgtttttgaactgttcaaaatatagcatcgatccgtgagaaatacgtttagccgcctttaatagaggaaatcccaccgcctttctggatctcaccaacgacgatagttctgaccagcaactcatttcttcatcatccacctgttttaacatataataggcaggagatagatatccgtcattgcaatattccttctcgtaggcacacaatctaatattgataaaatctccattctcttctctgcatttattatcttgtctcggtggctgattaggctgtggtcttggtttaggccttggtctatcgttgttgaatctattttggtcattaaatctttcatttcttcctggtatatttctatcacctcgtttggttggatttttgtctatattatcgtttgtaacatcggtacgggtattcatttatcacaaaaaaaacttctctaaatgagtctactgctagaaaacctcatcgaagaagataccatattttttgcaggaagtatatctgagtatgatgatttacaaatggttattgccggcgcaaaatccaaatttccaagatctatgctttctatttttaatatagtacctagaacgatgtcaaaatatgagttggagttgattcataacgaaaatatcacaggagcaatgtttaccacaatgtataatataagaaacaatttgggtctaggagatgataaactaactattgaagccattgaaaactatttcttggatcctaacaatgaagttatgcctcttattattaataatacggatatgactgccgtcattcctaaaaaaagtggtaggagaaagaataagaacatggttatcttccgtcaaggatcatcacctatcttgtgcattttcgaaactcgtaaaaagattaatatttataaagaaaatatggaatccgcgtcgactgagtatacacctatcggagacaacaaggctttgatatctaaatatgcgggaattaatgtcctgaatgtgtattctccttccacatccataagattgaatgccatttacggattcaccaataaaaataaactagagaaacttagtactaataaggaactagaatcgtatagttctagccctcttcaagaacccattaggttaaatgattttctgggactattggaatgtgttaaaaagaatattcctctaacagatattccgacaaaggattgattactataaatggagaatgttcctaatgtatactttaatcctgtgtttatagagcccacgtttaaacattctttattaagtgtttataaacacagattaatagttttatttgaagtattcgttgtattcattctaatatatgtattttttagatctgaattaaatatgttcttcatgcctaaacgaaaaatacccgatcctattgatagattacgacgtgctaatctagcgtgtgaagacgataaattaatgatctatggattaccatggatgacaactcaaacatctgcgttatcaataaatagtaaaccgatagtgtataaagattgtgcaaagcttttgcgatcaataaatggatcacaaccagtatctcttaacgatgttcttcgcagatgatgattcattttttaagtatttggctagtcaagatgatgaatcttcattatctgatatattgcaaatcactcaatatctagactttctgttattattattgatccaatcaaaaaataaattagaagccgtgggtcattgttatgaatctctttcagaggaatacagacaattgacaaaattcacagactttcaagattttaaaaaactgtttaacaaggtccctattgttacagatggaagggtcaaacttaataaaggatatttgttcgactttgtgattagtttgatgcgattcaaaaaagaatcctctctagctaccaccgcaatagatcctgttagatacatagatcctcgtcgcgatatcgcattttctaacgtgatggatatattaaagtcgaataaagtgaacaataattaattctttattgtcatcatgaacggcggacatattcagttgataatcggccccatgttttcaggtaaaagtacagaattaattagacgagttagacgttatcaaatagctcaatataaatgcgtgactataaaatattctaacgataatagatacggaacgggactatggacgcatgataagaataattttgaagcattggaagcaactaaactatgtgatgtcttggaatcaattacagatttctccgtgataggtatcgatgaaggacagttctttccagacattgtttaattctgtgagcgtatggcaaacgaaggaaaaatagttatagtagccgcactcgatgggacatttcaacgtaaaccgtttaataatattttgaatcttattccattatctgaaatggtggtaaaactaactgctgtgtgtatgaaatgctttaaggaggcttccttttctaaacgattgggtgaggaaaccgagatagagataataggaggtaatgatatgtatcaatcggtgtgtagaaagtgttacgtcggctcataatattatattttttatctaaaaaactaaaaataaacattgattaaattttaatataatacttaaaaatggatgttgtgtcgttagataaaccgtttatgtattttgaggaaattgataatgagttagattacgaaccagaaagtgcaaatgaggtcgcaaaaaaactgccgtatcaaggacagttaaaactattactaggagaattattttttcttagtaagttacagcgacacggtatattagatggtgccaccgtagtgtatataggatcggctcctggtacacatatacgttatttgagagatcatttctataatttaggagtgatcatcaaatggatgctaattgacggccgccatcatgatcctattttaaatggattgcgtgatgtaactctagtgactcggttcgttgatgaggaatatctacgatccatcaaaaaacaactgcatccttctaagattattttaatttctgatgtaagatccaaacgaggaggaaatgaacctagtacggcggatttactaagtaattacgctctacaaaatgtcatgattagtattttaaaccccgtggcatctagtcttaaatggagatgcccgtttccagatcaatggatcaaggacttttatatcccacacggtaataaaatgttacaaccttttgctccttcatattcagctgaaatgagattattaagtatttataccggtgagaacatgagactgactcgagttaccaaattagacgctgtaaattatgaaaaaaagatgtactaccttaataagatcgtccgtaacaaagtagttgttaactttgattatcctaatcaggaatatgactattttcacatgtactttatgctgaggaccgtgtactgcaataaaacatttcctactactaaagcaaaggtactatttctacaacaatctatatttcgtttcttaaatattccaacaacatcaactgaaaaagttagtcatgaaccaatacaacgtaaaatatctagcaaaaattctatgtctaaaaacagaaatagcaagagatccgtacgcagtaataaatagaaacgtactactgagatatactaccgatatagagtataatgatttagttactttaataaccgttagacataaaattgattctatgaaaactgtgtttcaggtatttaacgaatcatccataaattatactccggttgatgatgattatggagaaccaatcattataacatcgtatcttcaaaaaggtcataacaagtttcctgtaaattttctatacatagatgtggtaatatctgacttatttcctagctttgttagactagatactacagaaactaatatagttaatagtgtactacaaacaggcgatggtaaaaagactcttcgtcttcccaaaatgttagagacggaaatagttgtcaagattctctatcgccctaatataccattaaaaattgttagatttttccgcaataacatggtaactggagtagagatagccgatagatctgttatttcagtcgctgattaatcaattagtagagatgagataagaacattataataatcaataatatatcttatatcttatatcttatatcttatatcttgtttagaaaaatgctaatattaaaatagctaacgctagtaatccaatcggaagccatttgatatctataatagggtatctaatttcctgatttaaatagcggacagctatattctcggtagctactcgtttggaatcacaaacattatttacatctaatttactatctgtaatggaaacgtttcccaatgaaatggtacaatccgatacattgcattttgttatatttttttttaaagaggctggtaacaacgcatcgcttcgtttacatggctcgtaccaacaataatagggtaatcttgtatctattcctatccgtactatgcttttatcaggataaatacatttacatcgtatatcgtctttgttagcatcacagaatgcataaatttgttcgtccgtcatgataaaaatttaaagtgtaaatataactattatttttatagttgtaataaaaagggaaatttgattgtatactttcggttctttaaaagaaactgacttgataaaaatggctgtaatctctaaggttacgtatagtctatatgatcaaaaagagattaatgctacagatattatcattagtcatgttaaaaatgacgacgatatcggtaccgttaaagatggtagactaggtgctatggatggggcattatgtaagacttgtgggaaaacggaattggaatgtttcggtcactggggtaaagtaagtatttataaaactcatatagttaagcctgaatttatttcagaaattattcgtttactgaatcatatatgtattcactgcggattattgcgttcacgagaaccgtattccgacgatattaacctaaaagagttatcgggacacgctcttaggagattaaaggataaaatattatccaagaaaaagtcatgttggaacagtgaatgtatgcaaccgtatcaaaaaattactttttcaaagaaaaaggtttgtttcgtcaacaagttggatgatattaacgttcctaattctctcatctatcaaaagttaatttctattcatgaaaagttttggccattattagaaattcatcaatatccagctaacttattttatacagactactttcccatccctccgttgattattagaccggctattagtttttggatagatagtatacccaaagagaccaatgaattaacttacttattaggtatgatcgttaagaattgtaacttgaatgctgatgaacaggttatccagaaggcggtaatagaatacgatgatattaaaattatttctaataacactaccagtatcaatttatcatatattacatccggcaaaaataatatgattagaagttatatcgtcgcccgacgaaaagatcagaccgctagatctgtaattggtcccagtacatctatcaccgttaatgaggtaggaatgcccgcatatattagaaatacacttacagaaaagatatttgttaatgcctttacagtggataaagttaaacaactattagcgtcaaaccaagttaaattttactttaataaacgattaaaccaattaacaagaatacgccaaggaaagtttattaaaaataaaatacatttattgcctggtgattgggtagaagtagctgttcaagaatatacaagtattatttttggaagacagccgtctctacatagatacaacgtcatcgcttcatctatcagagctaccgaaggagatactatcaaaatatctcccggaattgccaactctcaaaatgctgatttcgacggggatgaggaatggatgatattagaacaaaatcctaaagctgtaattgaacaaagtattcttatgtatccgacgacgttactcaaacacgatattcatggagcccccgtttatggatctattcaagatgaaatcgtagcagcgtattcattgtttaggatacaagatctttgtttagatgaagtattgaacatcttggggaaatatggaagagagttcgatcctaaaggtaaatgtaaattcagcggtaaagatatctatacttacttgataggtgaaaagattaattatccgggtctcttaaaggatggtgaaattattgcaaacgacgtagatagtaattttgttgtggctatgaggcatctgtcattggctggactcttatccgatcataagtcgaacgtggaaggtatcaactttattatcaagtcatcttatgtttttaagagatatctatctatttacggttttggggtgacattcaaagatctgagaccaaattcgacgttcactaataaattggaggccatcaacgtagaaaaaatagaacttatcaaagaagcatacgccaaatatctcaacgatgtaagagacgggaaaatagttccattatctaaagctttagaggcggactatgtggaatccatgttatccaacttgacaaatcttaatatccgagagatagaagaacatatgagacaaacgctgatagatgatccagataataacctcctgaaaatggccaaagcgggttataaagtaaatcccacagaactaatgtatattctaggtacgtatggacaacaaaggattgatggtgaaccagcagagactcgagtattgggtagagttttaccttactatcttccagactctaaggatccagaaggaagaggttatattcttaattctttaacaaaaggattaacgggttctcaatattacttttcgatgctggttgccagatctcaatctactgatatcgtctgtgaaacatcacgtaccggaacactggctagaaaaatcattaaaaagatggaggatatggtggtcgacggatacggacaagtagttataggtaatacgctcatcaagtacgccgccaattataccaaaattctaggctcagtatgtaaacctgtagatcttatctatccagatgagtccatgacttggtatttggaaattagtgctctgtggaataaaataaaacagggattcgtttactctcagaaacagaaacttgcaaagaagacattggcgccgtttaatttcctagtattcgtcaaacccaccactgaggataatgctattaaggttaaggatctgtacgatatgattcataacgtcattgatgatgtgagagagaaatacttctttacggtatctaatatagattttatggagtatatattcttgacgcatcttaatccttctagaattagaattacaaaagaaacggctatcactatctttgaaaagttctatgaaaaactcaattatactctaggtggtggaactcctattggaattatttctgcacaggtattgtctgagaagtttacacaacaagccctgtccagttttcacactactgaaaaaagtggtgccgtcaaacaaaaacttggtttcaacgagtttaataacttgactaatttgagtaagaataagaccgaaattatcactctggtatccgatgatatctctaaacttcaatctgttaagattaatttcgaatttgtatgtttgggagaattaaatccagacatcactcttcgaaaagaaacagataggtatgtagtagatataatagtcaatagattatacatcaagagagcagaaataaccgaattagtcgtcgaatatatgattgaacgatttatctcctttagcgtcattgtaaaggaatggggtatggaaacattcattgaggatgaggataatattagatttactgtctacctaaatttcgttgaaccggaagaattgaatcttagtaagtttatgatggttcttccgggtgccgccaacaagggaaagattagtaaattcaagattcctatctctgactatacgggttatgacgacttcaatcaaacaaaaaagctcaataagatgactgtagaactcatgaatctaaaagaattgggttctttcgatttggaaaacgtcaacgtgtatcctggagtatggaatacatacgatatcttcggtatcgaggccgctcgtgaatacttgtgcgaagccatgttaaacacctatggagaagggttcgattatctgtatcagccttgtgatcttctcgctagtttactatgtgctagttacgaaccagaatcagtgaataaattcaagttcggcgcagctagtactcttaagagagctacgttcggagacaataaagcattgttaaacgcggctcttcataaaaagtcagaacctattaacgataatagtagctgccacttttttagcaaggtccctaatataggaactggatattacaaatactttatcgacttgggtcttctcatgagaatggaaaggaaactatctgataagatatcttctcaaaagatcaaggaaatggaagaaacagaagacttttaattcttatcaataacatatttttctatgatctgtcttttaaacgatggattttccacaaatgcgcctctcaagtccctcatagaatgatacacgtataaaaaatatagcataggcgatgactccttatttttagacattagatatgccaaaatcatagccccgcttctatttactcccgcagcacaatgaaccaacacgggctcgtttcgttgatcacatttagataaaaaggcggttacgtcgtcaaaatatttactaatatcggtagttgtatcatctaccaacggtatatgaataatattaatattagagttaggtaatgtatatttatccatcgtcaaatttaaaacatatttgaacttaacttcagatgatggtgcatccatagcatttttataatttcccaaatacacattattggttacccttgtcattatagtgggagatttggctttgtgcatatctccagttgaacgtagtagtaagtatttatacaaacttttcttatccatttataacgtacaaatggataaaactactttatcggtaaacgcgtgtaatttagaatacgttagagaaaaggctatagtaggcgtacaagcagccaaaacatcaacacttatattctttgttattatattggcaattagtgcgctattactctggtttcagacgtctgataatccagtctttaatgaattaacgagatatatgcgaattaaaaatacggttaacgattggaaatcattaacggatagcaaaacaaaattagaaagtgatagaggtagacttctagccgctggtaaggatgatatattcgacttcaaatgtgtggatttcggcgcctattttatagctatgcgattggataagaaaacatatctgccgcaagctattaggcgaggtactggagacgcgtggatggttaaaaaggcggcaaaggtcgatccatctgctcaacaattttgtcagtatttgataaaacacaagtctaataatgttattacttgtggtaatgagatgttaaatgaattaggttatagcggttattttatgtcaccgcattggtgttccgattttagtaatatggaatagtgttagataaatgcggtaacgaatgttcctgtaaggaaccataacagcttagatttaacgttaaagatgagcataaacataataaacaaaattacaatcaaacttataacattaatatcaaacaatccaaaaaatgaaatcagtggagtagtaaacgcgtacataactcctggataacgtttagcagctgccgttcctattctagaccaaaaatttggtttcatgttttcgaaacggtattctgcaacaagtcggggatcgtgttctacatatttggcggcattatccagtatctgcctattgatcttcatttcgttttcgattctggctatttcaaaataaaatcccgatgatagacctccagactttataatttcatctacgatgttcagcgccgtagtaactctaataatataggctgataagctaacatcataccctcctgtatatgtgaatatggcatgatttttgtccattacaagctcggttttaactttattgcctgtaataatttctctcatctgtaggatatctatttttttgtcatgcattgccttcaagacgggacgaagaaacgtaatatcctcaataacgttatcgttttctacaataactacatattctacctttttattttctaactcggtaaaaaaattagaatcccatagggctaaatgtctagcgatatttcttttcgtttcttctgtacacatagtgttacaaaaccctgaaaagaagtgagtatacttgtcatcatttctaatgtttcctccagtccactgtataaacgcataatccttgtaatgatctggatcatccttgactaccacaacatttcttttttctggcataacttcgttgtcctttacatcatcgaacttctgatcattaatatgctcatgaacattaggaaatgtttctgatggaggtctatcaataactggcacaacaataacaggagttttcaccgccgccatttagttattgaaattaatcatatacaactctttaatacgagttatattttcgtctatccattgtttcacattgacatatttcgacaaaaagatataaaatgcgtattccaatgcttctctgtttaatgaattactaaaatatacaaacacgtcactgtctggcaataaatgatatcttagaatattgtaacaatttattttgtattgcacatgttcgtgatctatgagttcttcttcgaatggcataggatctccgaatctgaaaacgtataaataggagttagaataataatatttgagagtattggtaatatataaactctttagcggtataattagtttttttctctcaatttctatttttagatgtgatggaaaaatgactaattttgtagcattagtatcatgaactctaatcaaaatcttaatatcttcgtcacacgttagctctttgaagtttttaagagatgcatcagttggttctacagatggagtaggtgcaacaattttttgttctacacatgtatgtactggagccattgttttaactataatggtgcttgtatcgaaaaactttaatgcagatagcggaagctcttcgccgcgactttctacgtcgtaattgggttctaacgccgatctctgaatggatactagttttctaagttctaatgtgattctctgaaaatgtaaatccaattcctccggcattatagatgtgtatacatcggtaaataaaactatagtatccaacgatcccttctcgcaaattctagtcttaaccaaaaaatcgtatataaccacggagatggcgtatttaagagtggattcttctaccgttttgttcttggatgtcatataggaaactataaagtccgcactactgttaagaatgattactaacgcaactatatagtttaaattaagcattttggaaacataaaataactctgtagacgatacttgactttcgaataagtttgcagacaaacgaagaaagaacagacctctcttaatttcagaagaaaactttttttcgtattcctgacgtctagagtttatatcaataagaaagttaagaattagtcggttaatgttgtatttcattacccaagtttgagatttcataatattatcaaaagacatgataatattaaagataaagcgctgactatgaacgaaatagctatatggttcgctcaagaatatagtcttgttaaacgtggaaacgataactgtatttttaatcacgtcagcggcatctaaattaaatataggtatatttattccacacactctacaatatgccacaccatcttcataataaataaattcgttagcaaaattattaattttagtgaaatagttagcgtcaactttcatagcttccttcaatctaatttgatgctcacacggtgcgaattccactctaacatcccttttccatgcctcaggttcatcgatctctataatatctagttttttgcgtttcacaaacacaggctcgtctctcgcgatgagatctgtatagtaactatgtaaatgataactagatagaaagatgtagctatatagatgacgatcctttaagagaggtataataactttaccccaatcagatagactgttgttatggtcttcggaaaaagaatttttataaatttttccagtattttccaaatatacgtacttaacatctaaaaaatccttaatgataataggaatggataatccgtctattttataaagaaatacatatcgcacattatacttttttttggaaatgggaataccgatgtgtctacataaatatgcaaagtctaaatattttttagagaatcttagttggtccaaattcttttccaagtacggtaatagatttttcatattgaacggtatcttcttaatctctggttctagttccgcattaaatgatgaaactaagtcactatttttataactaacgattacatcacctctaacatcatcatttaccagaatactgatcttcttttgtcgtaaatacatgtctaatgtgttaaaaaaaagatcatacaagttatacgtcatttcatctgtggtattcttgtcattgaaggataaactcgtactaatctcttctttaacagcctgttcaaatttatatcctatatacgaaaaaatagcaaccagtgtttgatcatccgcgtcaatattctgttctatcgtagtgtataacaatcgtatatcttcttctgtgatagtcgatacgttataaaggttgataacgaaaatatttttatttcgtgaaataaagtcatcgtaggattttggacttatattcgcgtctagtagatatgcttttatttttggaatgatctcaattagaatagtctctttagagtccatttaaagttacaaacaactaggaaattggtttatgatgtataatttttttagtttttatagattctttattctatacttaaaaaatgaaaataaatacaaaggttcttgagggttgtgttaaattgaaagcgagaaataatcataaattatttcattatcgcgatatccgttaagtttgtatcgtaatggcgtggtcaattacgaataaagcggatactagtagcttcacaaagatggctgaaatcagagctcatctaaaaaatagcgctgaaaataaagataaaaacgaggatattttcccggaagatgtaataattccatctactaagcccaaaaccaaacgagccactactcctcgtaaaccagcggctactaaaagatcaaccaaaaaggaggaagtggaagaagaagtagttatagaggaatatcatcaaacaactgaaaaaaattctccatctcctggagtcagcgacattgtagaaagcgtggctgctgtagagctcgatgatagcgacggggatgatgaacctatggtacaagttgaagctggtaaagtaaatcatagtgctagaagcgatctttctgacctaaaggtggctaccgacaatatcgttaaagatcttaagaaaattattactagaatctctgcagtatcgacggttctagaggatgttcaagcagctggtatctctagacaatttacttctatgactaaagctattacaacactatctgatctagtcaccgagggaaaatctaaagttgttcgtaaaaaagttaaaacttgtaagaagtaaatgcgtgcacttttttataaagatggtaaactctttaccgataataattttttaaatcctgtatcagacgataatccagcgtatgaggttttgcaacatgttaaaattcctactcatttaacagatgtagtagtatatgaacaaacgtgggaggaggcgttaactagattaatttttgtgggaagcgattcaaaaggacgtagacaatacttttacggaaaaatgcatgtacagaatcgcaacgctaaaagagatcgtatttttgttagagtatataacgttatgaaacgaattaattgttttataaacaaaaatataaagaaatcgtccacagattccaattatcagttggcggtttttatgttaatggaaactatgttttttattagatttggtaaaatgaaatatcttaaggagaatgaaacagtagggttattaacactaaaaaataaacacatagaaataagtcccgatgaaatagttatcaagtttgtaggaaaggacaaagtttcacatgaatttgttgttcataagtctaatagactatataaaccgctattgaaactgacggatgattctagtcccgaagaatttctgttcaacaaactaagtgaacgaaaggtatacgaatgtatcaaacagtttggtattagaatcaaggatctccgaacgtatggagtcaattatacgtttttatataatttttggacaaatgtaaagtccatatctcctcttccgtcaccaaaaaagttaatagcgttaactatcaaacaaactgctgaagtggtaggtcatactccatcaatttcaaaaagagcttatatggcaacgactattttagaaatggtaaaggataaaaattttttagatgtagtatctaaaactacgttcgatgaattcctatctatagtcgtagatcacgttaaatcatctacggatggatgatatagatctttacacaaataattacaagaccgataaatggaaatggataagcgtatgaaatctctcgcaatgacagctttcttcggagagctaagcacattagatattatggcattgataatgtctatatttaaacgccatccaaacaataccattttttcagtggataaggatggtcagtttatgattgatttcgaatacgataattataaggcttctcaatatttggatctgaccctcactccgatatctggagatgaatgcaagactcacgcatcgagtatagccgaacaattggcgtgtgtggatattattaaagaggatattagcgaatatatcaaaactactccccgtcttaaacgatttataaaaaaataccgcaatagatcagatactcgcatcagtcgagatacagaaaagcttaaaatagctctagctaaaggcatagattacgaatatataaaagacgcttgttaataagtaaatgaaaaaaaactagtcgtttataataaaacacgatatggatgccaacgtagtatcatcttctactattgcgacgtatatagacgctttagcgaagaatgcttcagaattagaacagaggtctaccgcatacgaaataaataatgaattggaactagtatttattaagccgccattgattactttgacaaatgtagtgaatatctctacgattcaggaatcgtttattcgatttaccgttactaataaggaaggtgttaaaattagaactaagattccattatctaaggtacatggtctagatgtaaaaaatgtacagttagtagatgctatagataacatagtttgggaaaagaaatcattagtgacggaaaatcgtcttcacaaagaatgcttgttgagactatcgacagaggaacgtcatatatttttggattacaagaaatatggatcctctatccgactagaattagtcaatcttattcaagcaaaaacaaaaaactttacgatagactttaagctaaaatattttctaggatccggtgcccaatctaaaagttctttgttgcacgctattaatcatccaaagtcaaggcctaatacatctctggaaatagaattcacacctagagacaatgaaacagttccatatgatgaactaataaaggaattgacgactctctcgcgtcatatatttatggcttctccagagaatgtaattctttctccgcctattaacgcgcctataaaaacctttatgttgcctaaacaagatatagtaggtttggatctggaaaatctatatgccgtaactaagactgacggcattcctataactatcagagttacatcaaacgggttgtattgttattttacacatcttggttatattattagatatcctgttaagagaataatagattccgaagtagtagtctttggtgaggcagttaaggataagaactggaccgtatatctcattaagctaatagagcccgtgaatgcaatcagtgatagactagaagaaagtaagtatgttgaatctaaactagtggatatttgtgatcggatagtattcaagtcaaagaaatacgaaggtccgtttactacaactagtgaagtcgtcgatatgttatctacatatttaccaaagcaaccagaaggtgttattctgttctattcaaagggacctaaatctaacattgattttaaaattaaaaaggaaaatactatagaccaaactgcaaatgtagtatttaggtacatgtccagtgaaccaattatctttggagaatcgtctatctttgtagagtataagaaatttagcaacgataaaggctttcctaaagaatatggttctggtaagattgtgttatataacggcgttaattatctaaataatatctattgtttggaatatattaatacacataatgaagtgggtattaagtccgtggttgtacctattaagtttatagcagaattcttagttaatggagaaatacttaaacctagaattgataaaaccatgaaatatattaactcagaagattattatggaaatcaacataatatcatagtcgaacatttaagagatcaaagcatcaaaataggagatatctttaacgaggataaactatcggatgtgggacatcaatacgccaataatgataaatttagattaaatccagaagttagttattttacgaataaacgaactagaggaccgttgggaattttatcaaactacgtcaagactcttcttatttctatgtattgttccaaaacatttttagacgattccaacaaacgaaaggtattggcgattgattttggaaacggtgctgacctggaaaaatacttttatggagagattgcgttattggtagcgacggatccggatgctgatgctatagctagaggaaatgaaagatacaacaaattaaactctggaattaaaaccaagtactacaaatttgactacattcaggaaactattcgatccgatacatttgtctctagtgtcagagaagtattctattttggaaagtttaatatcatcgactggcagtttgctatccattattcttttcatccgagacattatgctaccgtcatgaataacttatccgaactaactgcttctggaggcaaggtattaatcactaccatggacggagacaaattatcaaaattaacagataaaaagacttttataattcataagaatttacctagtagcgaaaactatatgtctgtagaaaaaatagctgatgatagaatagtggtatataatccatcaacaatgtctactccaatgactgaatacattatcaaaaagaacgatatagtcagagtgtttaacgaatacggatttgttcttgtagataacgttgatttcgctacaattatagaacgaagtaaaaagtttattaatggcgcatctacaatggaagatagaccgtctacaaaaaactttttcgaactaaatagaggagccattaaatgtgaaggtttagatgtcgaagacttacttagttactatgttgtttatgtcttttctaagcggtaaataataatatggtatgggttctgatatccccgttctaaatgcattaaataattccaatagagcgatttttgttcctataggaccttccaactgtggatactctgtattgttaatagatatattaatacttttgtcgggtaacagaggttctacgtcttctaaaaataaaagttttataacatctggcctgttcataaataaaaacttggcgattctatatatactcttattatcaaatctagccattgtcttatagatgtgagctactgtaggtgtaccatttgattttctttctaatactatatatttctctcgaagaagttcttgcacatcatctgggaataaaatactactgttgagtaaatcagttattttttttatatcgatattgatggacatttttatagttaaggataataagtatcccaaagtcgataacgacgataacgaagtatttatacttttaggaaatcacaatgactttatcagattaaaattaacaaaattaaaggagcatgtatttttttctgaatatattgtgactccagatacatatggatctttatgcgtcgaattaaatgggtctagttttcagcacggtggtagatatataaaggtggaggaatttatagatgctggaagacaagttagatggtgttctacatccaatcatatatctaaagatatacccgaagatatgcacactgataaatttgtcatttatgatatatacacttttgacgctttcaagaataaacgattggtattcgtacaggtacctccgtcgttaggagatgatagtcatttgactaatccgttattgtctccgtattatcgtaattcagtagccagacaaatggtcaataatatgatttttaatcaagattcatttttaaaatatttattagaacatctgattagaagccactatagagtttctaaacatataacaatagttagatacaaggataccgaagaattaaatctaacgagaatatgttataatagagataagtttaaggcgtttgtattcgcttggtttaacggcgtttcggaaaatgaaaaggtactagatacgtataaaaaggtatctaatttgatataatgaattcagtgactgtatcacacgcgccatatactattacttatcacgatgattgggaaccagtaatgagtcaattggtagagttttataacgaagtagccagttggctgctacgagacgagacgtcgcctattcctgataagttctttatacagttgaaacaaccgcttagaaataaacgagtatgtgtgtgcggtatagatccgtatccgaaagatggaactggtgtaccgttcgaatcaccaaattttacaaaaaaatcaattaaggagatagcttcatctatatctagattaaccggagtaattgattataaaggttataaccttaatataatagacggggttataccctggaattattacttaagttgtaaattaggagaaacaaaaagtcacgcgatctactgggataagatttccaagttactgctgcagcatataactaaacacgttagtgttctttattgtttgggtaaaacagatttctcgaatatacgggcaaagttagaatccccggtaactaccatagtcggatatcatccagcggctagagaccgccaattcgagaaagatagatcatttgaaattatcaacgttttactggaattagacaacaaggcacctataaattgggctcaagggtttatttattaatgctttagtgaaattttaacttgtgttctaaatggatgcggctattagaggtaatgatgttatctttgttcttaagactataggtgtcccgtcagcgtgcagacaaaatgaagatccaagatttgtagaagcatttaaatgcgacgagttagaaagatatattgagaataatccagaatgtacactattcgaaagtcttagggatgaggaagcatactctatagtcagaattttcatggatgtagatttagacgcgtgtctagacgaaatagattatttaacggctattcaagattttattatcgaggtgtcaaactgtgtagctagattcgcgtttacagaatgcggtgccattcatgaaaatgtaataaaatccatgagatctaatttttcattgactaagtctacaaatagagataaaacaagttttcatattatctttttagacacgtataccactatggatacattgatagctatgaaacgaacactattagaattaagtagatcatctgaaaatccactaacaagatcgatagacactgccgtatataggagaaaaacaactcttcgggttgtaggtactaggaaaaatccaaattgcgacactattcatgtaatgcaaccaccgcatgataatatagaagattacctattcacttacgtggatatgaacaacaatagttattacttttctctacaacaacgattggaggatttagttcctgataagttatgggaaccagggtttatttcattcgaagacgctataaaaagagtttcaaaaatattcattaattctataataaactttaatgatctcgatgaaaataattttacaacggtaccactggtcatagattacgtaacaccttgtgcattatgtaaaaaacgatcgcataaacatccgcatcaactatcgttggaaaatggtgctattagaatttacaaaactggtaatccacatagttgtaaagttaaaattgttccgttggatggtaataaactgtttaatattgcacaaagaattttagacactaactctgttttattaaccgaacgaggagaccatatagtttggattaataattcatggaaatttaacagcgaagaacccttgataacaaaactaattttgtcaataagacatcaactacctaaggaatattcaagcgaattactctgtccgaggaaacgaaagactgtagaagctaacatacgagacatgttagtagattcagtggagaccgatacctatccggataaacttccgtttaaaaatggtgtattggacctggtagacggaatgttttactctggagatgatgctaaaaaatatacgtgtactgtatcaaccggatttaaatttgacgatacaaagttcgtcgaagacagtccagaaatggaagagttaatgaatatcattaacgatatccaaccattaacggatgaaaataagaaaaatagagagctatatgaaaaaacattatctagttgtttatgcggtgctaccaaaggatgtttaacattcttttttggagaaactgcaactggaaagtcgacaaccaaacgtttgttaaagtctgctatcggtgacctgtttgttgagacgggtcaaacaattttaacagatgtattggataaaggacctaatccatttatcgctaacatgcatttgaaaagatctgtattctgtagcgaactacctgattttgcctgtagtggatcaaagaaaattagatctgacaatattaaaaagttgacagaaccttgtgtcattggaagaccgtgtttctccaataaaattaataatagaaaccatgcgacaatcattatcgatactaattacaaacctgtttttgataggatagataacgcattaatgagaagaattgccgtcgtgcgattcagaacacacttttctcaaccttctggtagagaggctgctgaaaataatgacgcgtacgataaagtcaaactattagacgaggggttagatggtaaaatacaaaataatagatatagattcgcatttctatacttgttggtgaaatggtacagaaaatatcatgttcctattatgaaactatatcctacacccgaagagattcctgactttgcattctatctcaaaataggtactctgttagtatctagctctgtaaagcatattccattaatgacggacctctccaaaaagggatatatattgtacgataatgtggttactcttccgttgactactttccaacagaaaatatccaagtattttaattctagactatttggacacgatatagagagcttcatcaatagacataagaaatttgccaatgttagtgatgaatatctgcaatatatattcatagaggatatttcatctccgtaaatatatgctcatatatttatagaagatatcacatatctaaatgaataccggaatcatagatttatttgataatcatgttgatagtataccaactatattacctcatcagttagctactctagattatctagttagaactatcatagatgagaacagaagcgtgttattgttccatattatgggatcaggtaaaacaataatcgctttgttgttcgccttggtagcttccagatttaaaaaggtttacattctagtgccgaacatcaacatcttaaaaattttcaattataatatgggtgtagctatgaacttgtttaatgacgaattcatagctgagaatatctttattcattccacaacaagtttttattctcttaattataacgataacgtcattaattataacggattatctcgctacaataactctatttttatcgttgatgaggcacataatatctttgggaataatactggagaacttatgaccgtgataaaaaataaaaacaagattccttttttactattgtctggatctcccattactaacacacctaatactctgggtcatattatagatttaatgtccgaagagacgatagattttggtgaaattattagtcgtggtaagaaagtaattcagacacttcttaacgaacgaggtgtgaatgtacttaaggatttgcttaaaggaagaatatcatattacgaaatgcctgataaagatctaccaacgataagatatcacggacgtaagtttctagatactagagtagtatattgtcacatgtctaaacttcaagagagagattatatgattactagacgacagctatgttatcatgaaatgtttgataaaaatatgtataacgtgtcaatggcagtattgggacaacttaatctgatgaataatttagatactttatttcaggaacaggataaggaattgtacccaaatctgaaaataaataatggcgtgttatacggagaagaattggtaacgttaaacattagttccaaatttaaatactttattaatcggatacagacactcaacggaaaacattttatatacttttctaattctacatatggcggattggtaattaaatatatcatgctcagtaatggatattctgaatataatggttctcagggaactaatccacatatgataaacggcaaaccaaaaacatttgctatcgttactagtaaaatgaaatcgtctttagaggatctattagatgtgtataattctcctgaaaacgatgatggtagtcaattgatgtttttgttttcatcaaacattatgtccgaatcctatactctgaaagaggtaaggcatatttggtttatgactatcccagatactttttctcaatacaaccaaattcttggacgatctattagaaaattctcttacgccgatatttctgaaccagttaatgtatatcttttagccgccgtatattccgatttcaatgacgaagtgacgtcattaaacgattacacacaggatgaattaattaatgttttaccatttgacatcaaaaagctgttatatctaaaatttaagacgaaagaaacgaatagaatatactctattcttcaagagatgtctgaaacgtattctcttccaccacatccatcaattgtaaaagttttattgggagaattggtcagacaatttttttataataattctcgtattaagtataacgataccaagttacttaaaatggttacatcagttataaaaaataaagaagacgctaggaattacatagatgatattgtaaacggtcacttctttgtatcgaataaagtatttgataaatctcttttatacaaatacgaaaacgatattattacagtaccgtttagactttcctacgaaccatttgtttggggagttaactttcgtaaagaatataacgtggtatcttctccataaaactgatgagatatataaagaaataaatgtcgagctttgttaccaatggatacctttccgttacattggaaccacacgagctgacgttagacataaaaactaatattaggaatgccgtatataagacgtatctccatagagaaattagtggtaaaatggccaagaaaatagaaattcgtgaagacgtggaattacctctcggcgaaatagttaataattctgtagttataaacgttccgtgtgtaataacctacgcgtattatcacgttggggatatagtcagaggaacattaaacatcgaagatgaatcaaatgtaactattcaatgtggagatttaatctgtaaactaagtagagattcgggtactgtatcatttagcgattcaaagtactgcttttttcgaaatggtaatgcgtatgacaatggcagcgaagtcactgccgttctaatggaggctcaacaaggtatcgaatctagttttgtttttctcgcgaatatcgtcgactcataaaaaagagaatagcggtaagtataaacacgaatactatggcaataattgcgaatgttttattctcttcgatatatttttgataatatgaaaaacatgtctctctcaaatcggacaaccatctcataaaatagttctcgcgcgctggagaggtagttgccgctcgtataatctctccagaataatatacttgcgtgtcgtcgttcaatttatacggatttctatagttctctgttatataatgcggtttgccctcatgattagacgacgacaatagtgttctaaatttagatagttgatcagaatgaatgtttattggcgttggaaaaattatccatacagcgtctgcagagtggttgatagttgttcctagatatgtaaaataatccaacttactaggcagcaaattgtctagataaaatactgaatcaaacggtgcagacgtattggcggatctaatggaatccaattgattaactatcttttgaaaatatacatttttatgatccaatacttgtaagaatatagaaataatgataagtccatcatcgtgtttttttgcctcttcataagaactatattttttcttattccaatgaacaagattaatctctccagagtatttgtacacatctatcaagtgattggatccataatcgtcttcctttccccaatatatatgtagtgatgataacacatattcattggggagaaaccctccacttatatatcctcctttaaaattaatccttactagttttccagtgttctggatagtggttggtttcgactcattataatgtatgtctaacggcttcaatcgcgcgttagaaattgcttttttagtttctatattaataggagatagttgttgcggcatagtaaaaatgaaatgataactgtttaaaaatagctcttagtatgggaattacaatggatgaggaagtgatatttgaaactcctagagaattaatatctattaaacgaataaaagatattccaagatcaaaagacacgcatgtgtttgctgcgtgtataacaagtgacggatatccgttaataggagctagaagaacttcattcgcgttccaggcgatattatctcaacaaaattcagattctatctttagagtatccactaaactattacggtttatgtactacaatgaactaagagaaatctttagacggttgagaaaaggttctatcaacaatatcgatcctcactttgaagagttaatattattgggtggtaaactagataaaaaggaatctattaaagattgtttaagaagagaattaaaagaggaaagtgatgaacgtataacagtaaaagaatttggaaatgtaattctaaaacttacaacacgggataaattatttaataaagtatatataagttattgcatggcgtgttttattaatcaatcgttggaggatttatcgcatactagtatttacaatgtagaaattagaaagattaaatcattaaatgattgtattaacgacgataaatacgaatatctgtcttatatttataatatgctagttaatagtaaatgaacttttacagatctagtataattagtcagattattaagtataatagacgactagctaagtctattatttgcgaggatgactctcaaattattacactcacggcattcgttaaccaatgcctatggtgtcataaacgagtatccgtgtccgctattttattaactactgataacaaaatattagtatgtaacagacgagatagttttctctattctgaaataattagaactagaaacatgtttagaaaaaaacgattatttctgaattattccaattatttgaacaaacaggaaagaagtatactatcgtcatttttttctctagatccagctactactgataatgatagaatagacgctatttatccgggtggcatacccaaaaggggtgagaatgttccagagtgtttatccagggaaattaaagaagaagttaatatagacaattcttttgtattcatagacactcggttttttattcatggcatcatagaagataccattattaataaattttttgaggtaatcttctttgtcggaagaatatctctaacgagtgatcaaatcattgatacatttaaaagtaatcatgaaatcaaggatctaatatttttagatccgaattcaggtaatggactccaatacgaaattgcaaaatatgctctagatactgcaaaacttaaatgttacggccatagaggatgttattatgaatcattaaaaaaattaactgaggatgattgattaaaaaatataaattaatttaccatcgtgtatttttataacgggattgtccggcatatcatgtagatagttaccgtctacatcgtatactcgaccatctacgcctttaaatcctctatttattgacattaatctattagaattggaataccaaatattagtaccctcaattagtttattggtaatattttttttagacgatagatcgatggctcttgaaaccaaggttttccaaccggactcattgtcgatcggtgagaagtctttttcattagcatgaatccattctaatgatgtatgtttaaacactctaaacaattggacaaattcttttgatttgctttgaatgatttcaaataggtcttcgtctacagtaggcataccattagataatctagccattataaagtgcacgtttacatatctacgttctggaggagtaagaacgtgactattgagacgaatggctcttcctactatctgacgaagagacgcctcgttccatgtcatatctaaaatgaagatatcattaattgagaaaaaactaataccctcgcctccactagaagagaatacgcatgttttaatgcattctccgttagtgtttgattcttggttaaactcagccaccgccttgattctagtatcttttgttctagatgagaactctatattagagataccaaagactttgaaatatagtaataagatttctattcctgactgattaacaaatggttcaaagactagacatttaccatgggatgctaatattcccaaacatacatctataaatttgacgcttttctcttttaattcagtaaatagagagatatcagccgcactagcatcccctttcaatagttctccctttttaaaggtatctaatgcggatttagaaaactctctatctcttaatgaatttttaaaatcattatatagtgttgctatctcttgcgcgtattcgcccggatcacgattttgtctttcaggaaagctatcgaacgtaaacgtagtagccatacgtctcagaattctaaatgatgatatacctgtttttatttcagcgagtttagccttttgataaatttcttcttgctttttcgacatattaacgtatcgcattaatactgttttcttagcgaatgatgcagacccttctacgtcatcaaaaatagaaaactcgttattaactatatacgaacatagtcctcctagtttggagactaattctttttcatcgactagacgtttattctcaaatagtgattggtgttgtaaggatcctggtcgtagtaagttaaccaacatggtgaattcttgcacactattgacgataggtgtagccgataaacaaatcatcttatggttttttaacgcaatggtcttagataaaaaattatatactgaacgagtaggacggatcttaccatcttctttgattaatgatttagaaatgaagttatgacattcatcaatgatgacgcatattctactcttggaattaatagttttgatattagtaaaaaatttatttctaaaattttgatcatcgtaattaataaaaatacaatccttcgttatctctggagcgtatctgagtatagtgttcatccaaggatcttctatcaaagcctttttcaccaataagataatagcccaattcgtataaatatccttaagatgtttgagaatatatacagtagtcattgttttaccgacacccgtttcatggaacaataaaagagaatgcatactgtctaatcctaagaaaactcttgctacaaaatgttgataatccttgaggcgtactacgtccgaccccatcatttcaacaggcatattagtagttctgcgcaatgcataatcgatataggccgcgtgtgatttactcatttatgagtgataagtaataactatgttttaaaaatcacagcagtagtttaactagtcttctctgatgtttgttttcgatactttttgaatcagaagtcatactagaataaagcaacgagtgaacgtaatagagagcttcgtatactctattcgaaaactctaagaacttattaatgaattccgtatccactggattgtttaaaatactaaattgaacactgttcacatccttccaagaagaagacttagtgacggacttaacatgagacataaataaatccaaattttttttacaaacatcactagccaccataatggcgctatctttcaaccagctatcgcttacgcattttagcagtctaacatttttaaagagactacaatatattctcatagtatcgattacacctctaccgaataaagttggaagtttaataatacaatatttttcgtttacaaaatcaaataatggtcgaaacacgtcgaaggttaacatcttataatcgctaatgtatagattgttttcagtgagatgattattagatttaatagcatctcgttcacgtttgaacagtttattgcgtgcgctgaggtcggcaactacggcgtccgctttagtactcctcccataatactttacgctattaatctttaaaatttcatagactttatctagatcgctttctggtaacatgatatcatgtgtaaaaagttttaacatgtcggtcggcattctatttagatcattaactctagaaatctgaagaaagtaattagctccgtattccagactaggtaatgggcttttacctagagacagattaagttctggcaatgtttcataaaatggaagaaggacatgcgttccctcccggatattttttacaatttcatccatttacaactctatagtttgttttcattattattagttattatctcccataatcttggtaatacttaccccttgatcgtaagataccttatacaggtcattacatacaactaccaattgtttttgtacataatagattggatggttgacatccatggtggaataaactactcgaacagatagtttatctttccccctagatacattagccgtaatagttgtcggcctaaagaatatctttggtgtaaagttaaaagttagggttcttgttccattattgctttttgtcagtagttcattataaattctcgagatgggtccgttctctgaatatagaacatcatttccaaatctaacttctagtctagaaataatatcggtcttattcttaaaatctattcccttgatgaagggatcgttaatgaacaaatccttggcctttgattcggctgatctattatctccgttatagacgttacgttgactagtccaaagacttacaggaatagatgtatcgatgatgttgatactatgtgatatgtgagcaaagattgttctcttagtggcatcactatatgttccagtaatggcggaaaactttttagaaatgttatatataaaagaattttttcgtgttccaaacattagcagattagtatgaagataaacactcatattatcaggaacattatcaatttttacatacacatcagcatcttgaatagaaacgataccatcttctggaacctctacgatctcagcagactccggataaccagtcggtggaccatcgctaacaataactagatcatccaacaatctactcacatatgcatctatataatctttttcatcttgtgagtaccctggatacgaaataaatttattatccgtatttccataataaggtttagtataaacagagagagatgttgccgcatgaacttcagttacagtcgccgttggttggtttatttgacctattactctcctaggtttctctataaacgatggtttaatttgtacattcttaaccatatatccaataaagctcaattcaggaacataaacaaattctttgttgaacgtttcaaagtcgaacgaagagtcacgaataacgatatcggatactggattgaaggttaccgttacggtaatttttgaatcggatagtttaagactgctgaatgtatcttccacatcaaacggagttttaatataaacgtatactgtagatggttctttaatagtgtcattaggagttaggccaatagaaatatcattaagttcactagaatatccagagtgtttcaaagcaattgtattattgatacaattattatataattcttcgccctcaatttcccaaataacaccgttacacgaagagatagatacgtgattaatacatttatatccaacatatggtacgtaactgaatcttcccatacctttaacttctggaagttccaaactcagaaccaaatgattaagcgcagtaatatactgatccctaatttcgaagctagcgatagcctgattgtctggaccatcgtttgtcataactccggatagagaaatatattgcggcatatataaagttggaatttgactatcgactgcgaagacattagaccgtttaatagagtcatccccaccgatcaaagaattaatgatagtattattcattttctatttaaaatggaaaaagcttacaataaactccgtagagaaatatctataatttgtgagttttccttaaagtaacagcttccgtaaacgccgtctttatctcttagtaagtttattgtatttatgaccttttccttatcttcatagaatactaaaggcaacaaagaaatttttggttcttctctaagagctacgtgagacttaaccatagaagccaacgaatccctacatattttagaacagaaataccctacttcaccacccttgtatgtctcaatactaataggtctaaaaaccaaatcttgattacaaaaccaacacttatcaattacactatttgtcttaatagacacatctgccatagatttataatactttggtagtatacaagcgagtgcttcttctttagcgggcttaaagactgctttaggtgctgaaataaccacatctggaaggcttactcgcttagccatttaattacggaactatttttttatacttctaatgagcaagtagaaaacctctcatctacaaaaacgtactcgtgtccataatcctctaccatagttacacgttttttagatctcatatgtgctaaaaagttttcccatactaattggttactattatttttcgtataatttttaacagtttgaggttttagatttttagttacagaagtgatatcgaatattttatccaaaaagaatgaataattaattgtcttagaaggagtgttttcttggcaaaagaataccaagtgcttaaatatttctactacttcattaatcttttctgtactcagattcagtttctcatcttttacttgattgattatttcaaagactaacttataatcctttttatttattctctcgttagccttaagaaaactagatacaaaatttgcatctacatcatccgtggatatttgatttttttccatgatatccaagagttccgagataatttctccagaacattgatgagacaataatctccgcaatacatttctcaaatgaataagtttattagacacgtggaagtttgactttttttgtacctttgtacatttttgaaataccgactcgcaaaaaatacaatattcatatccttgttcagatactataccgttatgtctacaaccgctacataatcgtagattcatgttaacactctacgtatctcgtcgtccaatattttatataaaaacattttatttctagacgttgccagaaaatcctgtaatatttttagttttttgggctgtgaataaagtatcgccctaatattgttaccgtcttccgccaatatagtagttaaattatccgcacatgcagaagaacaccgcttaggcggattcagtacaatgttatatttttcgtaccaactcatttaaatatcataatctaaaatagttctgtaatatgtctagcgctaatatattgatcataatcctgtgcataaattaagatacaacaatgtctcgaaatcatcgacatggcttcttccatagttagaagatcgtcgtcaaagttagcaacgtgattcatcaacatttgctgttttgaggcagcaaatactgaaccgtcgccattcaaccattcataaaaaccatcgtctgaatccattgataatttcttgtactggtttttgagagctcgcatcaatctagcatttctagctcccggattgaaaacagaaagaggatcgtacatccagggtccattttctgtaaatagaatcgtataatgtcccttcaagaaaatatcagacgatccacaatcaaagaattggtctccgagtttgtaacagacagcggactttaacctatacatgataccgtttagcataatttctggtgatacgtcaatcggagtatcatctattagagatctaaagccggtgtaacattctccaccaaacatattcttattctgacgtcgttctacataaaacatcattgctccattaacgataacaggggaatgaacagcactacccatcacattagttcccaatggatcaatgtgtgtaactccagaacatcttccatagcctatgttaggaggagcgaacaccactcttccactattgccatcgaatgccatagaataaatatccttggaattgatagaaatcggactgtcggatgttgtgatcatcttcataggattaacaactatgtatggtgccgcctgaagtttcatatcgtaactgatgccgtttataggtctagccacagaaaccaacgtaggtctaaatccaactatagacaaaatagaagccaatatctgttcctcatctgtcataacttgagagcatccagtatgaataatcttcattagatggggatctaccgcatcatcatcgttacaataaaaaattcccattctaatgttcataattgcttttctaatcatggtatgcatgtttgctctctgaatctctgtggaaattagatctgatacacctgtaatcactatcggattatcctccgtaagacgattaaccaacaacatataattataagactttacttttctaaattcataaagttgctggattaggctataggtgtctccatgtacatacgcgttctcgagcgcaggaagtttaataccgaatagtgccatcagaataggatgaatatagtaattagtttctggttttctataaataaaagacaaatcttgtgaactagacatatcggtaaaatgcatggattggaatcgtgtagtcgacagaagaatatgatgattagatggagagtatattttatctaactctttgagttggtcaccgattctaggactagctcgagaatgaataagtactaaaggatgagtacatttcacagaaacactagcattgttcaatgtgctctttacatgggtaaggagttgaaatagctcgtttctatttgttctgacaatatttagtttattcataatgttaagcatatcctgaatagtaaagttagatgtgtcatacttgttagtagttagatatttagcaattgcattcccatcatttctcaatctcgtactccaatcatgtgtagatgctacttcatctatagaaaccatacaatcctttttgataggctgttgagattgattatttcctgcacgtttaggtttggtacgttgatttctagcccctgcggatataaagtcatcgtctacaatttgggacaatgaattgcatacactacaagacaaagatttatcagaagtgtgaatatgatcttcatctaccaaagaaagagtttgattagtataactagattttagtcctgcgttagatgttaaaaaaacatcgctattgaccacggcttccattatttatattcgtagtttttactcgaaagcgtgattttaatatccaatcttattacttttggaatcgttcaaaacctttgactagttgtagaatttgatctattgccctacgcgtatactcccttgcatcatatacgttcgtcaccagatcgtttgtttcggcctgaagttggtgcatatctctttcaacattcgacatgagatccttaagggccatatcgtctagattttgttgagatgttgctcctggatttggattttgttgtgctgttgtacatactgtaccaccagtaggtgtaggagtacatacagtggccacaataggaggttgaggaggtgtaaccgttggagtagtacaagaaatacttccatccgattgttgtgtacatgtagttgttggtaacgtctgagaaggttgggtagatggcggtgtcgtcgtcttttgatctttattaaatttagagataatatcctgaacagcattgctcggcgtcaacgctggaaggagtgaactcgccggcgcatcagtatcttcagacagccaatcaaaaagattagacatatcagatgatgtattagtttgttgtcgtggttttggtgtaggagcagtactactaggtagaagaataggagccgatgtagctgttggaaccggctgtggagttatatgaatagttggttgtagcggttggataggctgtctgctggcggccatcatattatctctagctagttgttctcgcaactgtctttgataatacgactcttgagactttagtcctatttcaatcgcttcatcctttttcgtatccggatccttttcttcagaataatagattgacgactttggtgtagaggattctgccagcctctgtgagaacttgttaaagaagtccatttaaggctttaaaattgaattgcgattataagattaaatggcagacacagacgatattatcgactatgaatccgatgatctcaccgaatacgaggatgatgaagaagaggaagaagatggagagtcactagaaactagtgatatagatcccaaatcttcttataagattgtagaatcagcatccactcatatagaagatgcgcattccaatcttaaacatatagggaatcatatatctgctcttaaacgacgctatactagacgtataagtctatttgaaatagcgggtataatagcagaaagctataacttgcttcaacgaggaagattacctctagtttcagaattttctgacgaaacgatgaagcaaaatatgctacatgtaattatacaagagatagaggagggttcttgtcctatagtcatcgaaaagaacggagaattgttgtcggtaaacgattttgacaaagatggtctaaaattccatctagactatattatcaaaatttggaaacttcaaaaacgatattagaatttatacgaatatcgttctctaaatgtcacaatcaagtctcgcatgttcagcaatttattgtcgtactttatatcgtgttcattaacgatatcttgcaaaatagtaatgattctatcttccttcgatagatattcttcagagattattgtcttatattctttcttgttatcagatatgaatttgataagactttgaacattattgatacccgtctgtttaattttttctacagatattttagttttggcagattctatcgtatctgtcaatagacatccaacatcgacattcgacgtcaattgtctataaatcaacgtataaattttagaaataacattagcgaattgttgtgcgttgatgtcgttattctgaaacagtatgattttaggtagcattttcttaacaaagagaacgtatttattgttactcagttgaacagatgatatatccagattactaacgcatctgattccgtataccaaactttcagaagaaatggtatacaattgtttgtattcattcaatgtctctttttcagaaattagtttagagtcgaatactgcaataattttcaagagatagttttcatcagataagattttatttagtgtagatatgataaaactattgttttgttggagaacttgatacgccgcgttctctgtagtcgacgctctcaaatgggaaacaatctccattatttttttggaatcggatactatatcttcggtatcttgacgcagtctagtatacatagagttaagagagattagagtttgtacattaagcaacatgtctctaaatgtggctacaaacttttcctttttcacatcatctagtttattatataccgatttcacaacggcaccagatttaaggaaccagaatgaaaaactctgataactacaatatttcatcatagttacgattttatcatcttctatagttggtgtaatagcgcatacctttttctccaagactggaaccaacgtcataaaaatgtttaaatcaaaatccatatcaacatctgatgcgctaagaccagtctcgcgttcaagattatctttactaatggtgacgaactcatcgtataaaactctaagtttgtccattatttatttacagatttagttgtttaatttatttgtgctcttccagagttgggatagtatttttctaacgtcggtattatattattaggatctacgttcatatgtatcataatattaatcatccacgttttgataaatctatctttagcttctgaaataacgtatttaaacaaaggagaaaaatatttagctacggcatcagacgcaataacattttttgtaaatgtaacgtatttagacgacagatcttcgttaaaaagttttccatctatgtagaatccatcggttgttaacaccattcccgcgtcagattgaataggagtttgaatagtttgttttggaaatagatccttcaataacttatagttgggtgggaaaaaatcgattttatcactagactctttcttttttactatcattacctcatgaactatttcttgaatgagtatatgtattttctttcctatatcggacgcgttcattggaaaatataccatgtcgttaactataagaatatttttatcctcgtttacaaactgaataatatcagatgtagttcgtaaacgaactatatcatcaccagcacaacatctaactatatgatatccactagtttcctttagccgtttattatcttgttccatattagcagtcattccatcatttaagaaggcgtcaaagataatagggagaaatgacattttggattctgttacgactttaccaaaattaaggatatacggacttactatctttttctcaacgtcaatttgatgaacacacgatgaaaatgtgcttctatgagattgatcatgtagaaaacaacaagggatacaatatttccgcatatcatgaaatatattaagaaatcccaccttattatatttccccaaaggatccatgcacgtaaacattatgccgttatcattaataaagacttctttctcatcggatctgtaaaagttgttactgatttttttcattccaggatctagataattaataatgatgggttttctattcttattctttgtattttggcatatcctagaccagtaaacagtttccactttggtaaaatcagcagacttttgaacgctattaaacatggcattaatggcaataactaaaaatgtaaaatatttttctatgttaggaatatggtttttcactttaatagatatatggtttttggccaaaatgatagatatttttttatccgaggatagtaaaatattattagtcgccgtctctataaaaatgaagctagtctcgatatccaattttattctagaattgataggagtcgccaaatgtaccttatacgttatatctcccttgatgcgttccatttgtgtatctatatcggacacaagatctgtaaatagttttacgttattaatcatcacggtatcgccgtcgctagataacgctaatgtaccatccaagtcccaaatggagagatttaactgttcatcgtttagaataaaatgattaccggtcatattaataaagtgttcatcgtatctagataacaacgacttataattaatgtccaagtcttgaactcgctgaatgatcttttttaacccagttagttttagattggtacgaaatatattgttaaactttgattctacagtaatgtccaaatctagttgtggaaatacttccatcaacattgtttcaaacttgataatattattatctacatcttcgtacgatccaaattccggaatagatgtatcgcacgctctggccacccagataaccaaaaagtcacacgctccaggatatacattgtataaaaagctatcgttttttagtagggtttttttctgcgtgtatacgaagggattaaaaatagtattatcaacgtaactatattccaaattattcttatgagaatagataataatatcgtccttaatatctaacaaatttcctaaatatccctttaattgagtcattcgaagcgtcaatagaatatgtctcttaactatttccggctgttgtatatttaaatgacttcgtaaaaaataatatatgggcgacttctcatctatgtaatcatatggagtgagatatagggctcgttctacctcctgccccttacccacctgtaataccaattgcggacttactatatatcgcatatttatatcgtggggtaaagtgaaaatctactaccgatgatgtaagtcttacaatgttcgaaccagtaccagatcttaatttggaggcctccgtagaactaggggaggtaaatatagatcaaacaacacctatgataaaggagaatagcggttttatatcccgcagtagacgtctattcgcccatagatctaaggatgatgagagaaaactagcactacgattctttttacaaagactttattttttagatcatagagagattcattatttgttcagatgcgttgacgctgtaaaagacgtcactattaccaaaaaaaataacattatcgtggcgccttatatagcacttttaactatcgcatcaaaaggatgcaaacttacagaaacaatgattgaagcattctttccagaactatataatgaacatagtaagaaatttaaattcaactctcaagtatccatcatccaagaaaaactcggataccagtttggaaactatcacgtttatgattttgaaccgtattactctacagtagctctggctattcgagatgaacattcatctggcatttttaatatccgtcaagagagttatctggtaagttcattatctgaaataacatatagattttatctaattaatctaaaatctgatcttgttcaatggagtgctagtacgggcgctgtaattaatcaaatggtaaatactgtattgattacagtgtatgaaaagttacaactggtcatagaaaatgattcacaatttacatgttcattggctgtggaatcaaaacttccaataaaattacttaaagatagaaatgaattatttacaaaattcattaacgagttaaaaaagaccagttcattcaagataagcaaacgcgataaggatacgctactaaaatattttacttaggactggagttagaatttatagacgactcatttcgtttatcattgttactattattactattactatcattattagtgttggcattattagtattcttcttgtcatcttgttcagaaatatacagcaatgctatacctaatactaaatacattatcatgctcgcaatggctctaacaacaacgaaccaaaatgaatttggtcgtagcttttgttcacaaaaatacataaagaaatgtctacataaatctatggcgccattggctacttgaaatagcgccagtcctcctacagattttaatatagctgtataacatgacatttattcatcatcaaaagagacagagtcaccatctgtcatatttagattttttttcatgtgttcaaagtatcctctactcatttcattataatagtttatcatacttagaattttaggacggatcaatgagtaagacttgactagatcgtcagtagtaatttgtgcatcgtctattctgcatccgcttcgtcgaataatgtatagcatcgctttgagattctccatagctatcaagtctttatacaatgacatggaaatatctgtgaatactttatacttctccaacatcgatgccttaacatcatcgcctactttagcattgaaaatacgttctattgtgtagatggatgtagcaagatttttaaacaacaatgccatcttacacgatgattgcctcaagtctccaatcgtttgtttagaacgattagctacagagtccaatgcttggctgactagcatattattatctttagaaattgtattcttcaatgaggcgtttatcatatctgtgatttcgttagtcatattacagtctgactgggttgtaatgttatccaacatatcacctatggatacggtacacgtaccagcatttgtaataatcctatctaagatgttgtatggcattgcgcagaaaatatcttctcctgtaatatctccactctcgataaatctactcagattattcttaaatgccttattctctggagaaaagatatcagtgtccatcatttcattaatagtatacgcagaaaagataccacgagtatcaattctatccaagatacttatcggttccgagtcacagataatggtttcctctccttcgggagatcctgcatagaaatatctaggacaatagtttctatactgtctgtaactctgataatctctaaagtcactaactgataccatgaaattgagaagatcaaacgctgaagtaattaatttttctgcctcgtttttactacaactagttttcatcaatgtagtgacgatgtattgtttagttacttttggtctaatactgatgatagagatattattgcttcccataatggatcttctagtagtcaccttaaagcccattgatgcgaatagcagatagataaagtcttggtatgactcctttctaatatagtacggactacctttgtcacccaactttatacccacataagccataacaacctctttaatagccgtttcatgaggtttatcagccatgagcctgagtagttggaagaatctcatgaatcccgtctcagaaagtcctatatgcatgatagatttatctttcctgggaaactctcgtatagtcatagatgaaatactcttcaaagtttctgaaataagattagtaacagtcttacctccgactactctaggtaacaaacaaactctaataggtgttttctctgcggagataatatcagaaaggatagagcaataagtagtattattgtgattataaagaccgaatacataacaggtagaatttataaacatcatgtcctgaaggtttttagacttgtattcctcgtaatccataccgtcccaaaacatggatttggtaactttgatagccgtagatctttgttccttcgccaacaggttaaagaaattaataaagaatttgttgtttctatttatgtccacaaattgcacgtttggaagcgccacggttacattcactgcagcattttgaggatcgcgagtatgaagtacgatgttattgtttactggtatatctggaaagaaatctaccagtctaggaataagagattgatatcgcatagaaatagtaaagtttataatctcatcatcgaagagcattttgttaccattgtaataaatatccactctgtcatatgtataaatgaagtactgttcaaacatgatgagatgtttatatgttggcatagtagtgagatcgacgtttggtaatggcaatgtattaagattaactccataatgtctagcagcatctgcgatgttataagcgtcgtcaaagcggggtcgatcttgtattgttatatattgtctaacacctataagattatcaaaatcttgtctgcttaatacaccgttaacaatttttgccttgaattcttttattggtgcattaataacatccttatagaggatgttaaacaaataagtgttatcaaagttaagatctggatatttcttttctgctagaacatccattgagtcggagccatctggtttaatataaccaccgataaatctagctctgtattctgtatccgtcaatctaatattaagaaggtgttgagtgaaaggtggaagatcgtaaaagctgtgagtattaatgataggattagtttccgaactaatgttaattggggtattaataatatctatatttccagcgttaagtgtaacattaaacagttttaattcacgtgacgtggtatcaattaaataattaatgcccaatttggatatagcagcctgaagctcatcttgtttagttacggatcctaatgagttattaagcaatatatcgaacggatgaacgaaggttgttttaagttggtcacatactttgtaatctagacatagatgcggaagaacggtagaaactatacgaaataaatattcagagtcctctaattgatcaagagtaactattgacttaataggcatcatttatttagtattaaatgacgaccgtaccagtgacggatatacaaaacgatttaattacagagttttcagaagataattatccatctaacaaaaattatgaaataactcttcgtcaaatgtctattctaactcacgttaacaacgtggtagatagagaacataatgccgccgtagtgtcatctccagaggaaatatcctcacaacttaatgaagatctatttccagatgatgattcaccggccactattatcgaacgagtacaacctcatactactattattgacgatactccacctcctacgtttcgtagagagttattaatatcggaacaacgtcaacaacgagaaaaaagatttaatattacagtatcgaaaaatgctgaagcaataatggaatctagatctatgataacttctatgccaacacaaacaccatccttgggagtagtttatgataaagataaaagaattcagatgttagaggatgaagtggttaatcttagaaatcaacgatctaatacaaaatcatctgataatttagataattttaccaaaatactatttggtaagactccgtacaaatcaacagaagttaataagcgtatagccatcgttaattatgcaaatttgaacgggtcccccttatcagtcgaggacttggatgtttgttcggaggatgaaatagatagaatctataaaacgattaaacaatatcacgaaagtagaaaacgaaaaattatcgtcactaacgtgattattattgtcataaacattatcgagcaggcattgctaaaactcggatttgaagaaatcaaaggactgagtaccgatatcacttcagaaattatcgatgtggagatcggagatgactgcgatgctgtagcatctaaactaggaatcggtaacagtccggttcttaatattgtattgtttatactcaagatattcgttaaacgaattaaaattatttaatttaatacattcccatatccagacaacaatcgtctggattaatctgttcctgtcgtctcataccggacgacatattaatctttttattagtgggcatctttttagatggtttctttttcccagcattaactgagtcgatacctagaagatcgtgattgatctctccgaccattccacgaacttctaattggccgtctctgacggtaccataaactattttaccagcattagtaacagcttggacaatctgaccatccatcgcattgtacgatgtagtagtaactgttgttctacgtctaggagcaccagaagtatttttggagcccttggatgttgatgtagaagaagacgaggattttgattttggtttacatgtaatacattttgaactctttgattttgtatcacatgcgccggcagtcacatctgtttgagaattaagattattgttgcctcctttgacggctgcatctccaccgatttgcgctagtagatttttaagctgtggtgtaatcttattaactgtttcgatataatcatcgtaactgcttctaacggctaaattttttttatccgccatttagaagctaaaaatatttttatttatgcagaagatttaactagattatacaatgaactaatatgatccttttccagattatttacaaacttggtattttttggttctggaggaggcgaatttaaattcggacttggattcggattttgtaagttcttgatcttattatacatcgagtataggatggcgacagtaactgctacacaaataccgatcaaaagaagaataccaatcatttattgacaataacttcactattgatcaagtatgcaatatatcatcttttcactaaataagtagtaataatgattcaacaatgtcgagatatatggacgataataatttagttcatggaaatatcgctatgattggtgtgaatgactccgctaactctgtggggtgcgcagtgctttccccacatagaataaattagcattccgactgtgataataataccaagtataaacgccataatactcaatactttccatgtacgagtgggactggtagacttactaaagtcaataaaggcgaagatacacgaaagaatcaaaagaatgattccagcgattagcacgccggaaaaataatttccaatcataagcatcatgtccatttaactaataaaaattttaaatcgccgaatgaacaaagtggaatataaaccatataaaaacaatagtttgtactgcaaaaataatatctatttttgttttcgaagatatggtaaaattaaatagtagtacacagcatgttataactaacagcagcaacggctcgtaattacttatcatttactagacgaaaaggtggtgggatattttcttgctcaaataatacgaatatatcacccatccattttatgcgatgtttatatactctaatctttaatagatctatagacgacgggtttaccaacaatatagattttatcgattcatctaatttaaacccttccttaaacgtgaatgatctattatctggcataacgatgaccctacctgatgaatcggacaatgtactgggccatgtagaataaattatcaacgaattatcgtctacgaacatttatatcatttgttttaattttaggacgcgaataaatggatataaaatagaaaataacagatattacaaccagtgttatggccgcgcccaaccaggtaggcagttttattttatcttttactacaggttctcctggatgtacgtcaccaacggcggacgtagttctagtacaattagacgtaagttccgcttgggaattttttaacgctaaagagttaacgttaatcgtgcacccaacgtatttacatctagttcgttgaacatcttgattataatataaccattttctatctctagattcgtcagtgcactcatgtaaccaacataccctaggtcctaaatatttatctccggaattagattttggataattcgcgcaccaacaatttctatttcctttatgatcgttacaaaagacgtataatgccgtatccccaaaagtaaaataatcaggacgaataattctaataaactcagaacaatatctcgcatccatatgtttggagcaaatatcggaataagtagacatagccggtttccgttttgcacgtaaccattctaaacaattggggtttccaggatcgtttttacaaaatccagtcatgaaatcatcacaatgttctgtcttgtaattattattaaatatttttggacagtgtttggtatttgtcttagaacaacattttgctacgctatcactatcgcccaggagataatccttttttataaaatgacatcgttgcccggatgctatataatcagtggcgtgttttaaatccttaatatattcaggagttacctcgttctgataatagattaatgatccaggacgaaatttgaaagaactacatggttctccatgaattaatacatattgtttagcaaattcaggaactataaaactactacaatgatctatcgacataccatctatcaaacaaaacttgggtttaatttctcccggagatgtttcataatagtacgtataactttcttctgcaaacttaacagctctattatattcaggataattaaaacctaattccatatatttgtctcgtatatctgctattcctggtgctattttgattctattaagagtaacagctgcccccattcttaataatcgtcagtatttaaactgttaaatgttggtatatcaacatctaccttatttcccgcagtataaggtttgttgcaggtatactgttcaggaatggttacatttatacttcttctatagtcctgtctttcgatgttcatcacatatgcaaagaacagaataaacaaaataatgtaagaaataatattaaatatctgtgaattcgtaaatacattgattgccataataattacagcagctacaatacacacaatagacattcccacagtgttgccattacctccacgatacatttgagttactaagcaataggtaataactaagctagtaagaggcaatagaaaagatgagataaatatcatcaatatagagattagaggagggctatatagagccaagacgaacaaaatcaaaccgagtaacgttctaacatcattatttttgaagattcccaaataatcattcattcctccataatcgttttgcatcatacctccatctttaggcataaacgattgctgctgttcctctgtaaataaatctttatcaagcactccagcacccgcagagaagtcgtcaagcatattgtaatatcttaaataactcatttatatattaaaaaatgtcactattaaagatggagtataatctttatgccgaactaaaaaaaatgacttgtggtcaacccctaagtctttttaacgaagacggggatttcgtagaagttgaaccgggatcatcctttaagtttctgatacctaagggattttacgcctctccttccgtaaagacgagtctagtattcgagacattaacaacgaccgataataaaatcactagtatcaatccaacaaatgcgccaaagttatatcctcttcaacgcaaagtcgtatctgaagtagtttctaatatgaggaaaatgatcgaatcaaaacgtcctctatacattactcttcacttggcgtgtggatttggtaagactattaccacgtgttatcttatggctacacacggtagaaaaaccgtcatttgcgtacccaataaaatgttaatacatcaatggaagacacaggtagaggcagtcggattggaacataagatatccatagatggagtaagtagtctattaaaggaactaaagactcaaagtccggatgtattaatagtagtcagtagacatctgacaaacgatgccttttgtaaatatatcaataagcattatgatttgttcatcttggatgaatcacatacgtataatctgatgaacaatacagcagttacaagatttttagcgtattatcctccgatgatgtgttattttttaactgctacacctagaccatctaaccgaatttattgtaacagtattattaatattgccaagttatccaatctaaaaaaaactatctatgcagtagatagtttttttgagccatattccacagataatattagacatatggtaaaacgactagatggaccatctaataaatatcatatatataccgagaagttattatctgtagacgagcctagaaatcaacttattcttgataccctggtagaagaattcaagtcaggaactattaatcgcattttagttattactaaactacgtgaacatatggtattattctacaaacgattattagattttttcggaccagaggttgtatttataggagacgcccaaaatagacgtactccagatatggtcaaatcaatcaaggaactaaatagatttatattcgtatccaccttattttattccggtactggtttagatattcctagtttggattcgttgttcatttgctcggcagtaatcaacaatatgcaaatagagcaattactagggagggtatgtcgagaaacagaactattagataggacggtatatgtatttcctaacacatccatcaaagaaataaagtacatgataggaaatttcatgcaacgaattattagtctgtctgtagataaactaggatttaaacaaaaaagttatcggaaacatcaagaatccgatcccacttctgcatgtacaacatcatccagagaagaacgtgtattaaatagaatatttaactcgcaaaatcgttaagaagtttaagcgacgatccgcatgctgcgcaggccagtgtattacccctcatagtattaatataatccaatgatacttttgtgatgtcggaaatcttaaccaatttagactgacaggcagaacacgtcatgcaatcatcatcgtcatcgataactgtagtcttgggcttctttttgcgactcttcattccggaacgcacattggtgctatccatttaggtagtaaaaaataagtcagaatatgccctataacacgatcgtgcaaaacctggtatatcgtctctatctttatcacaatatagtgtatcgacatttttattattattgacctcgtttatcttggaacatggaatgggaacatttttgttatcaacggccatctttgccttaattccagatgttgtaaaattataactaaacagtctatcatcgacacaaatgaaattcttgtttagacgtttgtagtttacgtatgcggctcgttcgcgtctcattttttcagatattgcaggtactataatattaaaaataagaatgaaataacataggattaaaaataaagttatcatgacttctagcgctgatttaactaacttaaaagaattacttagtctgtacaaaagtttgagattttcagattctgcggctatagaaaagtataattctttggtagaatggggaacatctacttactggaaaataggcgtgcaaaaggtagctaatgtcgagacgtcaatatctgattattatgatgaggtaaaaaataaaccgtttaatattgatccgggctattacattttcttaccggtatattttgggagcgtctttatttattcgaagggtaaaaatatggtagaacttggatctggaaactcttttcaaataccagatgatatgcgaagtgcgtgtaacaaagtattagacagcgataacggaatagactttctgagatttgttttgttaaacaatagatggataatggaagatgctatatcaaaatatcagtctccagttaatatatttaaactagctagtgagtacggattaaacatacccaaatatttagaaattgaaatagaggaagacacattatttgacgacgagttatactctattatagaacgctctttcgatgataaatttccaaaaatatccatatcgtatattaagttgggagaacttagacggcaagttgtagactttttcaaattctcattcatgtatattgagtccatcaaggtagatcgtataggagataatatttttattcctagcgttataacaaaatcaggaaaaaagatattagtaaaagatgtagaccatttaatacgatccaaggttagagaacatacatttgtaaaagtaaaaaagaaaaacacattttccattttatacgactatgatggaaacggaacagaaactagaggagaagtaataaaacgaattatagacactataggacgagactattatgttaacggaaagtatttctctaaggttggtagtgcaggcttaaagcaattgactaataaattagatattaatgagtgcgcaactgtcgatgagttagttgatgagattaataaatccggaactgtaaaacgaaaaataaaaaaccaatcagcatttgatttaagcagagaatgtttgggatatccagaagcggattttataacgttagttaataacatgcggttcaaaatagaaaattgtaaggttgtaaatttcaatattgaaaatactaattgtttaaataacccgagtattgaaactatatatggaaactttaaccagttcgtctcaatctttaatgtcgtcaccgatgtcaaaaaaagattattcgagtgaaataatatgcgcctttgatataggtgcaaaaaatcctgccagaactgttttagaagtcaaggataactccgttagggtattggatatatcaaaattagactggagttctgattgggaaaggcgcatagctaaagatttgtcacaatatgaatacactacagttcttctagaacgtcagcctagaaggtcgccgtatgttaaatttatctattttattaaaggctttttatatcatacatcggctgccaaagttatttgcgtctcgcctgtcatgtctggtaattcatatagagatcgaaaaaagagatcggtcgaagcatttcttgattggatggacacattcggattgcgagactccgttccggatagacgcaaattagacgatgtagcggatagtttcaatttggctatgagatacgtattagataaatggaatactaattatacaccttataataggtgtaaatctagaaattacataaaaaaaatgtaataacgttagtaacgccattatggataatctatttacctttctacatgaaatagaagatagatatgccagaactatttttaactttcatctaataagttgcgatgaaataggagatatatatggtcttatgaaagaacgcatttcctcagaggatatgtttgataatatagtgtataataaagatatacatcctgccattaagaaactagtgtattgcgacatccaacttactaaacacattattaatcagaatacgtatccggtatttaacgattcttcacaagtgaaatgttgtcattatttcgacataaactcagataatagcaatattagctctcgtacagtagagatatttgagagggaaaagtcatctcttgtatcatatattaaaactaccaataagaagagaaaggtcaattacggcgaaataaagaaaactgttcatggaggcactaatgcaaattacttttccggtaaaaagtctgacgagtatctgagtactacagttagatccaacattaatcaaccttggatcaaaaccatttctaagagaatgagagtagatatcattaatcactctatagtaacgcgtggaaaaagctctatattacaaactatagaaattatttttactaatagaacatgtgtgaaaatattcaaggattctactatgcacattattctatccaaggacaaggatgaaaaggggtgtatacacatgattgacaaattattctatgtctattataatttatttctgttgttcgaagatatcatccaaaacgagtactttaaagaagtagctaatgttgtaaaccacgtactcacggctacggcattagatgagaaattattcctaattaagaaaatggctgaacacgatgtttatggagttagcaatttcaaaatagggatgtttaacctgacatttattaagtcgttggatcataccgttttcccctctctgttagatgaggatagcaaaataaagttttttaaggggaaaaagctcaatattgtagcattacgatctctggaggattgtataaattacgtgactaaatccgagaatatgatagaaatgatgaaggaaagatcgactattttaaatagcatagatatagaaacggaatcggtagatcgtctaaaagaattgcttctaaaatgaaaaaaaacactgattcagaaatggatcaacgactcggatataagtttttggtgcctgatcctaaagccggagttttttatagaccgttacatttccaatatgtatcgtattctaattttatattgcatcgattgcatgaaatcttgaccgtcaagcggccactcttatcgtttaagaataatacagaacgaattatgatagaaattagcaatgttaaagtgactcctccagattactcacctataatcgcgagtattaaaggtaagagttatgacgcattagccacgttcactgtaaatatctttaaagaggtaatgaccaaagagggtatatccatcactaaaataagtagttatgagggaaaagattctcatttgataaaaattccgctactaataggatacgggaataaaaatccacttgatacagccaagtatcttgttcctaatgtcataggtggagtctttatcaataaacaatctgtcgaaaaagtaggaattaatctagtagaaaagattacaacatggccaaaatttagggttgttaagccaaactcattcactttctcgttttcctccgtatcccctcctaatgtattaccgacaagatatcgccattacaagatatctctggatatatcacaattggaagcgttgaatatatcatcgacaaagacatttataacggtcaatattgttttgctgtctcaatatttatctagagtgagtctagaattcattagacgtagtttatcatacgatatgcctccagaagttgtctatctagtaaacgcgataatagatagtgctaaacgaattactgaatctattactgactttaatattgatacatacattaatgacctggtggaagctgaacacattaaacaaaaatctcagttaacgattaacgagttcaaatatgaaatgctgcataactttttacctcatatgaactatacacccgatcaactaaagggattttatatgatatctttactaagaaagtttctctactgtatcttccacacttctagatatccagatagagattcgatggtttgtcatcgcatcctaacgtacggcaaatattttgagacgttggcacatgatgaattagagaattacataggcaacatccgaaacgatatcatgaacaatcacaagaacagaggcacttacgcggtaaacattcatgtactaacaactcccggacttaatcacgcgttttctagcttattgagtggaaagttcaaaaagtcagacggtagttatcgaacacatcctcactattcatggatgcagaatatttctattcctaggagtgttggattttatccggatcaagtaaagatttcaaagatgttttctgtcagaaaataccatccaagtcaatatctttacttttgttcatcagacgttccggaaagaggtcctcaggtaggtttagtatctcaattgtctgtcttgagttccattacaaatatactaacgtctgagtatttggatttggaaaagaaaatttgtgagtatatcagatcatattataaagatgatataagttactttgaaacaggatttccaatcactatagaaaatgctctagtcgcatctcttaatccaaatatgatatgtgattttgtaactgactttagacgtagaaaacggatgggattcttcggtaacttggaggtaggtattactttagttagggatcacatgaatgaaattcgcattaatattggagcgggaagattagtcagaccattcttggttgtggataacggagagctcatgatggatgtgtgtccggagttagaaagcagattagacgacatgacattctctgacattcagaaagagtttccgcatgtcatcgaaatggtagatatagaacaatttacttttagtaacgtatgtgaatcggttcaaaaatttagaatgatgtcaaaggatgaaagaaagcaatacgatttatgtgactttcctgccgaatttagagatggatatgtagcatcttcactagtgggaatcaatcacaattctggacccagagctattcttggatgtgctcaagctaaacaagctatctcttgtctgagttcggatatacgaaataaaatagacaatggaattcatttgatgtatccagagaggccaattgtcattagtaaggctttagaaacttcaaagattgcggctaattgcttcggacaacatgttactatagcattaatgtcgtacaaaggtatcaatcaagaggatggaattatcatcaaaaaacaatttattcagagaggcggtctcgatatagttaccgcaaagaaacatcaagtagaaattccgttggaaaactttaataacaaagaaagagataggtctaacgcctattcaaaattagaaagtaatggattagttagactgaatgctttcttggaatccggagacgctatggcacgaaatatctcatcaagaactcttgaagatgattttgctagagataatcagattagcttcgatgtttccgagaaatataccgatatgtacaaatctcgcgttgaacgagtacaagtagaacttactgacaaagttaaggtacgagtattaaccatgaaagaaagaagacccattctaggagacaaatttaccactagaacgagtcaaaagggaacagtcgcgtatgtcgcggatgaaacggaacttccatacgacgaaaatggtatcacaccagatgtcattattaattctacatccatcttctctagaaaaactatatctatgttgatagaggttattttaacagccgcatattctgctaagccgtacaacaataagggagaaaaccgacctgtctgttttcctagtagtaacgaaacatccatcgatacatatatgcaattcgctaaacaatgttatgagcattcaaatccgaaattgtctgatgaagaattatcggataaaatcttttgtgaaaagattctctatgatcctgaaacggataagccttatgcatccaaagtattttttggaccaatttattacttgcgtctgagacatttaactcaggacaaggcaaccgttagatgtagaggtaaaaagacgaagctcattagacaggcgaatgagggacgaaaacgtggaggaggtatcaagttcggagaaatggagagagactgtttaatagcgcatggtgcagccaatactattacagaagttttgaaagattcggaagaagattatcaagatgtgtatgtttgtgaaaattgtggagacatagcagcacaaatcaagggtattaatacatgtcttagatgttcaaaacttaatctctctcctctcttaacaaaaattgataccacgcacgtatctaaagtatttcttactcaaatgaacgccagaggcgtaaaagtcaaattagatttcgaacgaagacctccttcgttttataaaccattagataaagttgatctcaagccgtcttttctggtgtaatattctagtttggtagtagatacatatcaatatcatcaaattcgagatccgaattataaaatgggcgtggattgttaactatagaatcggacgtctgatattcgaaaatctgtggagtttcaggttttggtggaggtgtaactgctacttgggatactgaagtctgatattcagaaagctgggggatgttctggttcgacatccaccgatggtgttacaccactactaatcggttcggtaacgtctgtggacgatggaggcaccacttctacagaacctgtagcctcagttgtcaacggagatacatttttaatgcgagaaaatgtataatttggtaatggtttctcatgtggatctgaagaagaggtaagatatctactagaaagataccgatcacgttctagttctcttttgtagaacttaactttttctttctcagcatctagttgatattccaacctcttcacgttactacgttcagattccaattcacgttcgcatgggttacctccgcagtttttacgagcgatttcacgttcagccttcatgcgtctctccctctctttatcgagtttatcagagcagtctttctgaaggcgatcgaactccataaatttctccaacgctttgattgtttccatagatttccgaagttcagcttttaggactgtgattctttttctttcgaattcacagctggatgtacaaccgtttccattaccgccatctctaagtttcttttctagatcggcaacatttcatccccatgccttttacattcctcgagtctactgtcgtcgaaatatcgttccagctccttttcgacatcaataactttagcacgttgtctctcaagctctcttttgtagttatctgattccctggcacgtttaagatcttcatgcaattgagtcagctcttaacttcctctcttgcttcttcgtcatagtacgcgcaatcactgtgagatccattgttaccacgtctacactcggcgagctcgcgtttaagagattcaatttcccgtttgtattggtccatgtttccattgctaccaccattagatttacaggctgctagttgtcgttcgagatcagaaatacgggttttcttggaattgatttcgtcgatgtacttggcatcgaaacacttattaagttctttttccaattctacgattttatttctttcgcgagtcaattccctcctgtagtaactatctgttttgtcagattcacgctctctacgtagactttcttgcaagttactaatttgttccctagcacgtccgagtttagttttatatgctgaatagagttctgattcatcctttgagcagatctctagcgatcgtttaagattcctaattctagtctttagcctatttacctcctcagaagatgttccgttaccgttgcgtttacactcgttaagctgtctatcaagatccatgattctatctctaagacgttgcatctctctttccatatcagcattgctttcattattacgtctgcagtcactcaactgtctttcaatatctgagattctatctctaagacgtcgcatctctctctgtttcggcattggtttcattattacgtttacagtcgttcaactgtctttcaagatctgatattctagattggagtctgctaatctctgtagcattttcacggcattcactcagttgtctttcaagatctgaaattttagattggagtctgctaatctctgtaagatttcctcctccgctctcgatgcagtcggtcaacttattctctagttctctaatacgcgaacgcagtgcatcaacttcttgcgtgtcttcctggttgcgtgtacattcatcgagtctagattcgagatctctaacgcgtcgtcgttcttcctcaagttctctgcgtactacagaaagcgtgtccttatcttgttgatatttagcaatttctgattctagagtactgattttgcttacgtagttactaatatttgtcttggccttatcaagatcctccttgtatttgtcgcattccttgatatccctacgaagtctggacagttcccattcgacattacgacgtttatcgatttcagctcggagatcgtcatcgcgttgttttagccacatacgactgagttcaagttctcgttgacaagatccatctacttttccattcctaatagtatccagttccttttctagttctgaacgcatttctcgttccctatcaagcgattctctcaattctcggatagtcttcttatcaatttctaataaatctgaaccatcatctgtcccattttgaatatccctgtgttctttgatctcttttgtaagtcggtcgattctttcggttttataaacagaatccctttccaaagtcctaatcttactgagtttatcactaagttctgcattcaattcggtgagttttctcttggcttcttccaactctgttttaaactctccactatttccgcattcttcctcgcatttatctaaccattcaattagtttattaataactagttggtaatcagcgattcctatagccgttcttgtaattgtgggaacataattaggatcttctaatggattgtatggcttgatagcatcatctttatcattattagggggatggacaaccttaattggttggtcctcatctcctccagtagcgtgtggttcttcaataccagtgttagtaataggcttaggcaaatgcttgtcgtacgcgggcacttcctcatccatcaagtatttataatcgggttctacttcagaatattcttttctaagagacgcgacttcgggagttagtagaagaactctgtttctgtatctatcaacgctggaatcaatactcaagttaaggatagcgaatacctcatcgtcatcatccgtatcttctgaaacaccatcatatgacatttcatgaagtctaacgtattgataaatagaatcagatttagtattaaacagatccttaacctttttagtaaacgcatatgtatattttagatctccagatttcataatatgatcacatgccttaaatgtcagtgcttccatgatataatctggaacactaatgggtgacgaaaaagatacagcaccatatgctacgttgataaataaatctgaaccactaagtagataatgattaatgttaagaaagaggaaatattcagtgtataggtatgtcttggcgtcatatcttgtactaaacacgctaaacagtttgttaatgtgatcaatttccaatagattaattagagcagcgggaataccaacaaacatattaccacatccgtattttctatgaatatcacatatcatgttaaaaaatcttgatagaagagcgaatatctcgtctgacttaatgagtcgtagttcagcagcaacataagtcataactgtaaatagaacatactttcctgtagtgttgattctagactccacatcaacaccattattaaaaatagttttatatacatctttaatctgctctccgttaatcgtcgaacgttctagtatacggaaacactttgatttcttatctgtagttaatgacttagtgatatcacgaagaatattacgaattacatttcttgtttttcttgagagacctgattcagaactcaactcatcgttccatagtttttctacctcagtggcgaaatctttggagtgcttggtacatttttcaataaggttcgtgacctccatttattataaaaaatttattcaaaacttaactacaatcgggtaattataaaatcgtagatctcccatgtggcggaatactaccatctatcgcatgtggatggacagtaggtaatggccatgggaacagtaatgtttgcatatttatctttcttgccagtattactgcatattgtcccaatgtttcgatgtgatgttctaacctatcaactgccgctgtatcacaacaatagtgtccgatgaaattaagattatgatccaatgtgtttaatatatgattatcaagtcttatacgatccgcgtcttttttgacaggatcaggttcttctacaggaagaagtttcggcctcttatgatattcatgtctgggaaacggtggtctagggtgaggctccggtatcggagtgggttttggattataatcatcatcgtctatgacatcatcttcgacttcgatatttattttgctatcttgatgatgtcctgtatcagttgcattttcagcactcgactgaatattagcgcattcattgtctattattaccatatttctaaacccaaaatgtatgtgttgaacatcagtactatcgttgatgagtcttatagcatgaattcgcttatcgttatcgggtttatcttctgtcaccttagcaattccttttttattaaactctacataatcatatccatttctattgtttgttctaatataaacgagtatagcatcattgctaaatttttcaatagtatcaaaaacagaatatcctaaaccatataatatatattcaggaacactcaaactaaatgtccaggattctcctaaatacgtaaactttaatagtgcgaaatcattcaaaaatctaccacttatagatagatagtacataaatgcgtatagtagtctacctatctctttattatgaaaaccggcattacgatcatatatgtcgtgatatacctgtgatccgtttacgttaaaccataaatacatgggtgatcctataaacatgaatttatttctaattctcagagctatagttaattgaccgtgtaatatttgcttacatgcatacttgatacgcttattaataagatttttatcattgctcgttatttcagaatcgtatatataaggagtaccatcgtgattcttaccagatattatacaaaatactatatataaaatatattgacccacgttagtaatcatataaatgtttaacgttttaaattttgtattcaatgatccattatcatacgctatcatggtcttgtaatattcattctttaaaatataatattgtgttagccattgcattggagctcctaatggagattttctattctcatccattttaggataggctttcataaagtccctaataacttcgtgaataatgtttctatgttttctactgatgcatgtatttgcttcgatttttttatcccatgtttcatctatcatagatttaaacgcagtaatgctcgcaacattaacatcttgaaccgttggtacaattccgttccataaatttataatgttcgccatttatataactcattttttgaatatacttttaattaacaaaagagttaagttactcatatggacgccgtccagtctgaacatcaatctttttagccagagatatcatagccgctcttagagtttcagcgtgattttccaacctaaatagaacttcatcgttgcgtttacaacacttttctatttgttcaaactttgttgttacattagtaatctttttttccaaattagttagccgttgtttgagagtttcctcattgtcgtcttcatcggctttaacaattgcttcgcgtttagcctctggctttttagcagcctttgtagaaaaaaattcagttgctggaattgcaagatcgtcatctccggggaaaagagttccgtccatttaaagtacagattttagaaactgacactctgcgttatttatatttggtacaacacatggattataaatattgatgttaataacatcagaaaatgtaaagtctatacattgttgcatcgtgttaaattttctaatggatctagtattattgggtccaacttctgcctgaaatccaaatatggaagcggatacaaaaccgtttcctggataaaccacacatctccacttttgctttacatcagaaattgtgtcgttgacatcttgaactctcctatctaatgccggtgttccacctatagattttgaatattcgaatgctgcatgagtagcattaaattccttaatattgccataattttcatatattgagtaaccctggataaaaagtaaacacaccgcagccgtcgctaccacaataaaaaaaattgatagagagttcatttataatctattagaagctgacaaaatttttttacacgcatcagacaatgctttaataaatagttcaacatctacttttgtcatatcgaaccgatggtatgattctaacctagaattacatccgaaaaagttgactatgttcatagtcattaagtcattaacaaacaacattccagactctggattataagacgatactgtttcgtcacaattacctaccttaatcatgtgattatgaatattggctattagagcaccttctaagaaatctataatatctttgaaacacgatttaaaatcaaaccacgaatatacttctacgaagaaagttagtttacccataggagaaataactataaatggagatctaaatacaaaatccggatctatgatagttttaacattattatattctctattaaatacctccacatctaaaaatgttaattttgaaactatgtcttcgtttattaccgtacctgaactaaacgctataagctctattgtttgagaactctttaaacgatattcttgaaatacatgtaacaaagtttcctttaactcggtcggtttatctaccatagttacagaatttgtatccttatctataatataataatcaaaatcgtataaagttatataattatcgcgttcagattgggatcttttcaaatagactaaaaaccccatttctctagtaagtatcttatgtatatgtttgtaaaatatcttcatggtgggaatatgctctaccgcagttagccattcctcattgacagcggtagatgtattagacaaaactattccaatgtttaacaagggccattttacgagattattaaatccttgtttgataaatgtagccaatgagggttcgagttcaacgacgattgaattctcttcccgcggatgctgcatgatgaacgacgggatgttgttcgattgatttggaattctttttcgactttttgtttatattaaatattttaaaatttatagcggatagcaattcatgtaccacggataatgtagacgcgtattgcgcatcgatatctttattattagataaatttatcaataaatgtgagaagtttgcctcgttaaggtcttccatttaaatattatataaacatttgtgtttgtaacttattcgtcttttatggaatagttttttactagtaaagctgcaattacacactttgtccgtaaaacataaatataaacaccagcttttatcaatcgttccaaaaagtcgacggcggacatttttaacatggcatctattttaaatacacttaggtttttggaaaaaacatcattttataattgtaacgattcaataactaaagaaaagattaagattaaacataagggaatgtcatttgtattttataagccaaagcattctaccgttgttaaatacttgtctggaggaggtatatatcatgatgatttggttgtattggggaaggtaacaattaataatctaaagatgatgctattttacatggatttatcatatcatggagtgacaagtagtggagcaatttacaaattgggatcgtctatcgatagactttctctaaataggactattgttacaaaagttaataattatgatgatacattttttgacgacgatgattgatcgctattgcacaattttgtttttgtactttctaatatagtgtttaggttctttttcatatgagaatattgatttactaaaatatctatgtttaacttttgttctatgacgtccttatcggcggtatcggtacatatacgtaattcaccttcacaaaatacggagtcttcgataataatagccaatcgattattggatctagctgtctgtatcatattcaacatgtttaatatatcctttcgtttcccctttacaggcatcgatcgtagcatattttccgcgtctgatatggaaatgttaaaactacaaaaatgcgtaatgttagcccgtcctaatattggtacgtgtctataagtttggcatagtagaataatagacgtgtttaaatgccttccaaagtttaagaattctattagagtattgcattttgatagtttatcgcctacatcatcaaaaataagtaaaaagtgtgctgattttttatgattttgtgcgacagcaatacatttttctatgttacttttagttcgtatcagattatattctagagattcctgactactaacgaaattaatatgatttggccaaatgtatccatcataatctgggttataaacgggtgtaaacaagaatatatgtttatattttttaactagtgtagaaaacagagatagtaaatagatagtttttccagatccagatcctcctgttaaaaccattctaaacggcatttttaataaattttctcttgaaaattgtttttcttggaaacaattcataattatatttacagttactaaattaatttgataataaatcaaaatatggaaaactaaggttgttagtagggaggagaacaaagaaggcacatcgtgatataaataacatttattatcatgatgacaccagaaaacgacgaagagcagacatctgtgttctccgctactgtttacggagacaaaattcagggaaagaataaacgcaaacgcgtgattggtctatgtattagaatatctatggttatttcactactatctatgattaccatgtccgcgtttctcatagtgcgcctaaatcaatgcatgtctgctaacgaggctgctattactgacgccgctgttgccgttgctgctgcatcatctactcatagaaaggttgcgtctagcactacacaatatgatcacaaagaaagctgtaatggtttatattaccagggttcttgttatatattacattcagactaccagttattctcggatgctaaagcaaattgcactgcggaatcatcaacactacccaataaatccgatgtcttgactacctggctcattgattatgttgaggatacatggggatctgatggtaatccaattacaaaaactacatccgattatcaagattctgatgtatcacaagaagttagaaagtatttttgtgttaaaacaatgaactaatatttatttttgtacattaataaatgaaatcgcttaatagacaaactgtaagtaggtttaagaagttgtcggtgccggccgctataatgatgatactctcaaccattattagtggcataggaacatttctgcattacaaagaagaactgatgcctagtgcttgcgccaatggatggatacaatacgataaacattgttatttagatactaacattaaaatgtctacagataatgcggtttatcagtgtcgtaaattacgagctagattgcctagacctgatactagacatctgagagtattgtttagtattttttataaagattattgggtaagtttaaaaaagaccaatgataaatggttagatattaataatgataaagatatagatattagtaaattaacaaattttaaacaactaaacagtacgacggatgctgaagcgtgttatatatacaagtctggaaaactggttaaaacagtatgtaaaagtactcaatctgtactatgtgttaaaaaattctacaagtgacaacaaaaaatgaattaataataagtcgttaacgtacgccgccatggacgccgcgtttgttattactccaatgggtgtgttgactataacagatacattgtatgatgatctcgatatctcaatcatggactttataggaccatacattataggtaacataaaaactgtccaaatagatgtacgggatataaaatattccgacatgcaaaaatgctactttagctataagggtaaaatagttcctcaggattctaatgatttggctagattcaacatttatagcatttgtgccgcatacagatcaaaaaataccatcatcatagcatgcgactatgatatcatgttagatatagaagataaacatcagccattttatctattcccatctattgatgtttttaacgctacaatcatagaagcgtataacctgtatacagctggagattatcatctaatcatcaatccttcagataatctgaaaatgaaattgtcgtttaattcttcattctgcatatcagacggcaatggatggatcataattgatgggaaatgcaatagtaattttttatcataaaagttgtaaagtaaataataaaacaataaatattgaactagtagtacgtatattgagcaatcagaaatgatgctggtacctcttatcacggtgaccgtagttgcgggaacaatattagtatgttatatattatatatttgtaggaaaaagatacgtactgtctataatgacaataaaattatcatgacaaaattaaaaaagataaagagttctaattccagcaaatctagtaaatcaactgatagcgaatcagactgggaggatcactgtagtgctatggaacaaaacaatgacgtagataatatttctaggaatgagatattggacgatgatagcttcgctggtagtttaatatgggataacgaatccaatgttatggcgcctagcacagaacacatttacgatagtgttgctggaagcacgctgctaataaataatgatcgtaatgaacagactatttatcagaacactacagtagtaattaatgaaacggagactgttgaagtacttaatgaagataccaaacagaatcctaactattcatccaatcctttcgtaaattataataaaaccagtatttgtagcaagtcaaatccgtttattacagaacttaacaataaatttagtgagaataatccgtttagacgagcacatagcgatgattatcttaataagcaagaacaagatcatgaacacgatgatatagaatcatcggtcgtatcattggtgtgattagtttcctttttataaaattgaagtaatatttagtattattgctgccgtcacgttgtacaaatggagatattccctgtattcggcatttctaaaattagcaattttattgctaataatgactgtagatattatatagatacagaacatcaaaaaattatatctgatgagatcaatagacagatggatgaaacggtacttcttaccaacatcttaagcgtagaagttgtaaatgacaatgagatgtaccatcttattcctcatagattatcgacgattatactctgtattagttctgtcggaggatgtgttatctctatagataatgacatcaatggcaaaaatattctaacctttcccattgatcatgctgtaatcatatccccactgagtaaatgtgtcgtagttagcaagggtcctacaaccatattggttgttaaagcggatatacctagcaaacgattggtaacatcgtttacaaacgacatactatatgtaaacaatctgtcactgattaattatttgccgttgtctgtattcattattagacgagtcaccgactatttggatagacacatatgcgatcagatatttgctaataataagtggtattcccttataaccatcgacgataagcaatatcctattccatcaaactgtataggtatgtcctctgccaagtacataaattctagcatcgagcaagatactttaatccatgtttgtaacctcgagcatccgttcgactcagtatacaaaaaaatgcagtcgtacaattctctacctatcaaggaacaaatattgtacggtagaattgataatataaatatgagcattagtatttctgtggattaatagatttctagtatggggatcattaatcatctctaatctctaaatacctcataaaacgaaaaaaaagctattatcaaatactgtacggaatggattcattctcttctctttttatgaaactctgttgtatatctactgataaaactggaagcaaaaaatctgatagaaagaataagaataagatcaaggattatatggaacacgattattataaaataacaatagttcctggttcctcttccacgtctactagctcgtggtattatacacatgcctagtaatagtctctttgcgttgacggaaagcagactagaaataacaggctaaaatgttcagacaccataatagttcccaacccagataataacagagttccatcaacacattcctttaaactcaatcccaaacccaaaaccgttaaaatgtatccggccaattgatagtagataatgaggtgtacagcgcatgataatttacacagtaaccaaaatgaaaatactttagtaattataagaaatatagacggtaatgtcatcatcaacaatccgataatatgcctgagagtaaacattgacggataaaacaaaaatgctccgcataactctatcatggcaataacacaaccaaatacttgtaagattcctaaattagtagaaaatacaacgaatatcgatgtataagtgatctcgagaaataataagaataaagtaatgcccgtaaagataaacatcaacattgtttggtaatcattaaaccaattagtatgaagttgaactaatttcacagtagattttattccagtgttatcctcgcatgtataagtacctggtaagatatctttatattccataatcaatgagacatcactatctgataacgaatgaagtctagcactagtatgccatttacttaatattgtcgtcttggaagttttattataagttaaaatatcatggttatccaatttccatctaatatactttgtcggattatctatagtacacggaataatgatggtatcattacatgctgtatactctatggtctttgtagttgttataacaaccaacgtatagaggtatatcaacgatattctaactcttgacattttttatttatttaaaatgatacctttgttatttattttattctattttgctaacggtattgaatggcataagtttgaaacgagtgaagaaataatttctacttacttattagacgacgtattatacacgggtgttaatggggcggtatacacattttcaaataataaactaaacaaaactggtttaactaataataattatataacaacatctataaaagtagaggatgcggataaggatacattagtatgcggaaccaataacggaaatcccaaatgttggaaaatagacggttcagacgacccaaaacatagaggtagaggatacgctccttatcaaaatagcaaagtaacgataatcagtcacaacggatgtgtactatctgacataaacatatcaaaagaaggaattaaacgatggagaagatttgacggaccatgtggttatgatttattcacggcggataacgtaattccaaaagatggtttacgaggagcattcgtcgataaagacggtacttatgacaaagtttacattcttttcactgatactatcggctcaaagagaattgtcaaaattccgtatatagcacaaatgtgcctaaacgacgaaggtggtccatcatcattgtctagtcatagatggtcgacgtttctcaaagtcgaattagaatgtgatatcgacggaagaagttatagacaaattattcattctagaactataaaaacagataatgatacgatactatatgtattcttcgatagtccttattccaagtccgcattatgtacctattctatgaataccattaaacaatctttttctacgtcaaaattggaaggatatacaaagcaattgccgtctccagctcctggtatatgtttaccagctggaaaagttgttccacataccacgtttgaagtcatagaacaatataatgtactagatgatattataaagcctttatctaaccaacctatcttcgaaggaccgtctggtgttaaatggttcgatataaaggagaaggaaaatgaacatcgggaatatagaatatacttcataaaagaaaattctatatattcgttcgatacaaaatctaaacaaactcgtagctcgcaagtcgatgcgcgactattttcagtaatggtaactgcgaaaccgttatttatagcagatatagggataggagtaggaatgccacaaatgaaaaaaatacttaaaatgtaatcttaatcgagtacaccacacgacaatgaacaaacataagacagattatgctggttatgcttgctgcgtaatatgcggtctaattgtcggaattatttttacagcgacactattaaaagttgtagaacgtaaattagttcatacaccattaatagataaaacgataaaagatgcatatattagagaagattgtcctactgactggataagctataataataaatgtatccatttatctactgatcgaaaaacctgggaggaaggacgtaatgcatgcaaagctctaaattcaaattcggatctaattaagatagagactccaaacgagttaagttttttaagaagccttagacgaggctattgggtaggagaatccgaaatattaaaccagacaaccccatataattttatagctaagaatgccacgaagaatggaactaaaaaacggaaatatatttgtagcacaacgaatactcccaaactgcattcgtgttacactatataacaattacactacatttttatcataccactacttcggttagatgttttagaaaaaaataaatatcgccgtaccgttcttgtttttataaaaataacaattaacaattatcaaattttttctttaatattttacgtggttgaccattcttggtggtaaaataatctcttagtgttggaatggaatgctgtttaatgtttccacactcatcgtatattttgacgtatgtagtcacatcgtttacgcaatagtcagactgtagttctatcatgcttcctacatcagaaggaggaacagttttaaagtctcttggttttaatctattaccgttagttttcatgaaatcctttgttttatccacttcacattttaaataaatgtccactatacattcttttgttaattttactagatcgtcatgggtcatagaatttataggttccgtagtccatggatccaaactagcaaacttcgcgtatacggtatcgcgattagtgtatacaccaactgtatgaaaattaagaaaacagtttaataaatcaacagaaatatttaatcctccgtttgatacagatgcgccatatttatggatttcggattcacacgttgtttgtctgaggtgttcgtctagtgttgcttctacgtaaacttcgattcccatatattctttattgtcagaatcgcataccgatttatcatcatacactgtttgaaaactaaatggtatacacatcaaaataataaataataacgagtacattctgcaatattgttatcgtaattggaaaattagtgttcgagtgagttggattatgtgagtattggattgtatattttattttatattttgtaataagaataaaatgctaatgtcaagtcttattaaaaacatatataataaataacaatggctgaatggcataaaataataagttcgaggatgccgccatcgttgattacaagactacaaagaatgttctagctgctattcctaacagaacatttgccaagattaatccgggtgaaattattcctctcatcactaatcgtaatattctaaaacctcttattggtcagaaatattgtattgtatatactaactctctaatggatgagaacacgtatgctatggagttgcttactgggtacgcccctgtatctccgatcgttatagcgagaactcataccgcacttatatttttgatgggtaagccaacaacatccagacgtgacgtgtatagaacgtgtagagatcacgctacccgtgtacgcgcaactggtaattaaaataaaaagtaatattcatatgtagtgtcaattttaaatgatgatgaaatggataatatccatattgacgatgtcaataatgccggtattggcatacagctcatcgatttttagatttcattcagaggatgtggaattatgttatgggcatttgtattttgataggatctataatgtagtaaatataaaatataatccgcatattccatatagatataattttattaatcgcacgttaaccgtagatgaactagacgataatgtcttttttacacatggttattttttaaaacacaaatatggttcacttaatcctagtttgattgtctcattatcaggaaacttaaaatataatgatatacaatgctcagtaaatgtatcgtgtctcattaaaaatttggcaacgagtacatctactatattaacatctaaacataagacttattctctacatcggtccacgtgtattactataataggatacgattctattatatggtataaagatataaatgacaagtataatgacatctatgattttactgcaatatgtatgctaatagcgtctacattgatagtgaccatatacgtgtttaaaaaaataaaaatgaactcttaattatgctatgctattagaaatggataaaatcaaaattacggttgattcaaaaattggtaatgttgttaccatatcgtataacttggaaaagataactattgatgtcacacctaaaaagaaaaaagaaaaggatgtattattagcgcaatcagttgctgtcgaagaggcaaaagatgtcaaggtagaagaaaaaaatattatcgatattgaagatgacgatgatatggatgtagaaagcgcataatactatctataaaaataagtatataataaatactttttatttacggtactcttgtagtggtgataccctactcgattatttttttaaaaaaaaaatacttattctgattcttctaaccatttccgtgttcgtttgaatgccacatcgacgtcaaagataggggagtagttgaaatctagttctgcattgttggtacgcacctcaaatgtagtgttggatatcttcaacgtatagttgttgagtagtgatggttttctaaatagaattctcttcatatcattcttgcacgcgtacatttttagcatccatcttggaatcctagatccttgttctattcccaatggtttcatcaatagaagattaaacatatcgtacgaacacgatggagagtaatcgtagcaaaagtaagcatttcctttaatcttagatcccggatactggatatattttgcagccaacacgtgcatccatgcaacatttcctacatatacccggctatgcaccgcgtcatcatcgactgtacgatacataatgttaccgtgttgcttacattgctcgtaaaagactttcgtcaatttgtctccttctccgtaaattctagtgggtcttaggcaacaagtatacaattttgctccattcatgattacggaattattggctttcataaccagttgctcggccatacgtttactttttgcgtatacatgtcctggtgatatatcataaagggtatgctcatggccgatgaatggatcaccgtgtttattgggtcctattgcttccatgctactagtatagatcaaatacttgattcctaggtccacacaagctgccaaaatagtctgtgttccataatagtttactttcatgatttcattatcggtgtattttccaaatacatccactagagcagccgtatgaataatcagatttaccccatctagcgcttctctcaccttatcaaagtcgtttatatcacattgtatatagtttataaccttaactttcgaggttattggttgtggatcttctacaatatctatgactctgatttcttgaacatcatctgcactaattaacagttttactatatacctgcctagaaatccggcaccaccagtaaccgcgtacacggccattgctgccactcataatatcagactacttattctattttactaaataatggctgtttgtataatagaccacgataatatcagaggagttatttactttgaaccagtccatggaaaagataaagttttaggatcagttattggattaaaatccggaacgtatagtttaataattcatcgttacggagatattagtcaaggatgtgattccataggcagtccagaaatatttatcggtaacatctttgtaaacagatatggtgtagcatatgtttatttagatacagatgtaaatatatctacaattattggaaaggcgttatctatttcaaaaaatgatcagagattagcgtgtggagttattggtatttcttacataaatgaaaagataatacattttcttacaattaacgagaatggcgtttgatatatcagttaatgcgtctaaaacaataaatgcattagtttacttttctactcagcaaaataaattagtcatacgtaatgaagttaatgatacacactacactgtcgaatttgatagggacaaagtagttgacacgtttatttcatataatagacataatgacaccatagagataagaggggtgcttccagaggaaactaatattggttgcgcggttaatacgccggttagtatgacttacttgtataataagtatagttttaaactgattttagcagaatatataagacacagaaatactatatccggcaatatttattcggcattgatgacactagatgatttggctattaaacagtatggagacattgatctattatttaatgagaaacttaaagtagactccgattcgggactatttgactttgtcaactttgtaaaggatatgatatgttgtgattctagaatagtagtagctctatctagtctagtatctaaacattgggaattgacaaataaaaaatataggtgtatggcattagccgaacatatatctgatagtattccaatatctgagctatctagactacgatacaatctatgtaagtatctacgcggacacactgagagcatagaggataaatttgattattttgaagacgatgattcgtctacatgttctgccgtaaccgacagggaaacggatgtataattttttttatagcgtgaaggatatgataaaaaatataattgttgtatttatcccattccaatcaccttatatgattctgtaacacaataaaggagtcttatagatgtatagaggtcagatactggtttgataaactgtttattccacataagtatgtttgactttatggttagacccgcatactttaacaaatcactgaaaattggagttaggtattgacctctcagaatcagttgccgttctggaacattaaatgtattttttatgatatactccaacgcatttatgtgggcatacaacaagtcattactaatggaatattccaagagttttagttgtctagtatttaacaagagaagagatttcaacagactgtttatgaactcgaatgccgcctcattgtcgcttatattgatgatgtcgaattctcccaatatcatcaccgatgagtagctcatcttgttatcgggatccaagttttctaaagatgtcattaaaccctcgatcatgaatggatttatcatcatcgtttttatgttggacatgagcttagtccgtttgtccacatctatagaagatgatttctgaattatttcatatatctctctctttaactccaggaacttgtcaggatggtctactttaatatgttctcgtctaagagatgaaaatctttggatggttgcacgcgacttttctctaaaggatgacgttgcccaagatcctctcttaaatgaatccatcttatccttggacaagatggacagtctattttccttagatggtttaatatttttgttacccatgatctataaaggtagacctaatcgtctcggatgaccatatatttattttcagttttattatacgcataaattgtaaaaaatatgttaggtttacaaaaatgtctcgtggggcattaatcgtttttgaaggattggacaaatctggaaaaacaacacaatgtatgaacatcatggaatctataccggcaaacacgataaaatatcttaactttcctcagagatccactgtcactggaaaaatgatagatgactatctaactcgtaaaaaaacctataatgatcatatagttaatctattattttgtgcaaatagatgggagtttgcatcttttatacaagaacaactagaacagggaattactttaatagttgatagatacgcattttctggagtagcgtatgccgccgctaaaggcgcgtcaatgactctcagtaagagttatgaatctggattgcctaaacccgacttagttatattcttggaatctggtagcaaagaaattaatagaaacgtcggtgaggaaatttatgaagatgttacattccaacaaaaggtattacaagaatataaaaaaatgattgaagaaggagatattcattggcaaattatttcttctgaattcgaggaagatgtaaagaaggagttgattaagaatatagttatagaggctatacacacggttactggaccagtggggcaactgtggatgtaatagtgaaattacattttttataaatagatgttagtacagtgttataaatggatgaagcatattactctggcaacttggaatcagtactcggatacgtgtccgatatgcataccgaactcgtatcaatatctcaattagttattgccaagatagaaactatagataatgatatattaaacaaggacattgtaaattttatcatgtgtagatcaaacttggataatccatttatctctttcctagatactgtatatactattatagatcaagagaactatcagactgagttgattaattcattagacgacaatgaaattatcgattgtatagttaataagtttatgagcttttataaggataacctagaaaatatagtagatgctatcatcactctaaaatatataatgaataatccagattttaaaactacgtatgcagaagtactcggttccagaatagcggatatagatattaaacaagtgatacgtgagaatatactacaattgtctaataatatccgcgaacgatatttgtgaaaatattaaaaaaaaatactttttttattaaatgacgtcttttcgtgaatttagaaaattatgctgtgctatatatcacgcatcaggatataaagaaaaatctaaattaattagagactttataacagatagggatgataaatatttgatcattaagctattgcttcccggattagacgatagaatttataacatgaacgataaacaaattataaaattatatagtataatatttaaacaatctcaggaagatatgctacaagatttaggatacggatatataggagacactattaggactttcttcaaagagaacacagaaatccgtccacgagataaaagcattttaactttagaagaagtggatagtttcttaactacgttatcatccgtaactaaagaatcgcatcaaataaaattattgactgatatcgcatccgtttgtacatgtaatgatttaaaatgtgtagtcatgcttattgataaagatctaaaaattaaagcgggtcctcggtacgtacttaacgctattagtcctcatgcctatgatgtgtttagaaaatctaataacttgaaagagataatagaaaatgcatctaaacaaaatctagactctatatctatttctgttatgactccaattaatcccatgttagcggaatcgtgtgattctgtcaataaggcgtttaaaaaatttccatcaggaatgtttgcggaagtcaaatacgatggtgaaagagtacaagttcataaaaataataacgagtttgccttctttagtagaaacatgaaaccagtactctctcataaagtggattatctcaaagaatacataccgaaagcatttaaaaaagctacgtctatcgtattggattctgaaattgttcttgtagacgaacataatgtaccgctcccgtttggaagtttaggaatacacaaaaagaaagaatataaaaactctaacatgtgtttgttcgtgtttgactgtttgtactttgatggattcgatatgacggacattccattgtacgaacgaagatcttttctcaaagatgttatggttgaaatacccaatagaatagtattctcagagttgacgaatattagtaacgagtctcagttaactgacgtattggatgatgcactaacgagaaaattagaaggattggtcttaaaagatattaatggagtatacgaaccgggaaagagaagatggttaaaaataaagcgagactatttgaacgagggttccatggcagattctgccgatttagtagtactaggtgcttactatggtaaaggagcaaagggtggtatcatggcagtctttctaatgggttgttacgacgatgaatccggtaaatggaagacggttaccaagtgttcaggacacgatgataatacgttaagggagttgcaagaccaattaaagatgattaaaattaacaaggatcccaaaaaaattccagagtggttagtagttaataaaatctatattcccgattttgtagtagaggatccgaaacaatctcagatatgggaaatttcaggagcagagtttacatcttccaagtcccataccgcaaatggaatatccattagatttcctagatttactaggataagagaggataaaacgtggaaagaatctactcatctaaacgatttagtaaacttgactaaatcttaatagttacatacaaactgaaaattaaaataacactatttagttggtggtcgccatggatggtgttattgtatactgtctaaacgcgctagtaaaacatggcgaggaaataaatcatataaaaaatgatttcatgattaaaccatgttgtgaaagagtttgtgaaaaagtcaagaacgttcacatcggcggacaatctaaaaacaatacagtgattgcagatttgccatatctggataatgctgtatcggatgtatgcaattcactgtataaaaagaatgtatcaagaatatccagatttgctaatttgataaagatagatgacgatgacaagactcctactggtgtatataattattttaaacctaaagatgccattcctgttattatatctataggaaaggatagagatgtctgtgaactattaatctcatcagacatatcgtgtgcatgcgtggagttaaattcatatcacgtagccattcttcccatggatgtttccttttttaccaaaggaaatgcatcattgattattctcctgtttgatttctctatcgatgcggcacctctcttaagaagtgtaaccgataataatgttattatatctagacaccagcgtctacatgacgagcttccgagttccaattggttcaagttttacataagtataaagtccgactattgttctatattatatatggttgttgatggatctgtgatgcatgcgatagctgataatagaactcacgcaattattagcaaaaatatattagacaatactacgattaacgatgagtgtagatgctgttattttgaaccacagattaggattcttgatagagatgagatgctcaatggatcatcgtgtgatatgaacagacattgtattatgatgaatttacctgatgtaggcgaatttggatctagtatgttggggaaatatgaacctgacatgattaagattgctctttcggtggctggtaatttaataagaaatcgagactacattcccgggagacgaggctatagctactacgtttacggtatagcctctagataatttttttaagcacgaaataaaaaacataattttaaaccaatctatttcatactattttgtgtgatcaccatggacataaagatagatattagtatttctggtgataaatttacggtgactactaggagggaaaatgaagaaagaaaaaaatatctacctctccaaaaagaaaaaactactgatgttatcaaacctgattatcttgagtacgatgacttgttagatagagatgagatgtttactattctagaggaatattttatgtacagaggtctattaggcctcagaataaaatatggacgactctttaacgaaattaaaaaattcgacaatgatgcggaagaacaattcggtactatagaagaactcaagcagaaacttagattaaattctgaagagggagcagataactttatagattatataaaggtacaaaaacaggatatcgtcaaacttactgtatacgattgcatatctatgataggattgtgtgcatgcgtggtagatgtttggagaaatgagaaactgttttctagatggaaatattgtttacgagcgattaaactgtttattgatgatcacatgcttgataagataaaatctatactgcagaatagactagtatatgtggaaatgtcatagaaagttaaaagttaatgagagcaaaaatatataaggttgtattccatatttgttattttttctgtaatagttaaaaaaatacattcgatggtctatctatcagattattatgtgttataaggtactttttctcataataaactagagtatgagtaagatagtgtttttcaaaacatataaatctaaaattgatggatgagatatacagctattaatttcgaaaatatattttaatctgataactttaaacatggatttttgatggtggtttaacgttttaaaaaaagattttgttattgtagtatatgataatattaaaagatggatataaagaatttgctgactgcatgtactattttttacattactacattggctacggcagatatacctacttcgtcaccaacggggcatgtgacgagggagaatatcttgataagaggcataatcaatgttgtaatcagtgtccacctggagaatttgccaaggttagatgtaatggtaacgataacacaaaatgtgaacgctgcccacctcatacatataccgcaatccccaattactctaatggatgtcatcaatgtagaaaatgcccaacaggatcatttgataaggtaaagtgtaccggaacacagaacagtaaatgttcgtgtcttcctggttggtattgcgctactgattcttcacagactgaagattgtcgagattgtataccaaaaaggagatgtccatgcggatactttggtggaatagatgaacaaggaaatcctatttgtaaatcgtgttgtgttggtgaatattgcgactacctacgtaattatagacttgatccatttcctccatgcaaactatctaaatgtaattaattatgattttgatgataatgttaccatacattatatcgctacttggttagtgtattattcagtatgaagacctattaataattacttatcttttgacgatcttgttataattataatataaaaacttatggcatagtaacttataattgctgacgcgataaattcgtaataatctgttttgttcaaaggaatctacaggcataaaaataaaaatataatttataatatactcttacaacgccatcatgaataacagcagtgaattgattgctgttattaatggatttagaaatagtggacgattttgtgatattagtatagttattaatgatgaaaggataaacgctcataaactcatcctatctggagcctccgaatatttttccattctgttttccaataattttatcgattctaatgaatacgaagttaatctaagtcatttagattatcaaagtgttaacgatttgatcgattatatttatgggatacctttgagcctaactaacgataacgtgaaatatattctttcaaccgctgattttttacaaattggatctgccattactgagtgtgaaaattacatacttaaaaatctttgttctagaaactgtatcgatttctacatatacgctgataaatataataacaagaaaatagaatcagcgtcgtttaacacaatattacaaaatattttgagactcatcaacgatgaaaactttaaatacttaacagaggaatcaatgataaaaattttaagcgatgatatgttaaatataaaaaatgaggatttcgccccactaattctcattaaatggttagagagtactcaacaaccatgcaccgtcgagttacttaaatgcctcagaatatcattgctttccccacaagttataaaatcactttatagtcatcgactggttagttcaatctacgaatgtataacattcttaaacaatatagcattcttggatgaatcatttcctagataccatagcatcgagttgatatctatcggtataagtaattcgcatgataagatttccataaactgctacaatcataaaaaaaatacatgggaaatgatatcttcacgtagatataggtgtagtttcgcagtggccgtcctggataatattatctatatgatgggtggatatgatcagtccccgtatagaagttcaaaggttatagcgtacaatacatgtacaaattcttggatatatgatataccagagctaaaatatcctcgttctaattgtgggggactggctgatgacgaatacatttattgtataggcggcatacgcgatcaggattcatcgttgacatctagtattgatagatggaagccatcaaaaccatattggcagaagtatgctaaaatgcgcgaaccaaaatgtgatatgggggttgcgatgttaaacggattaatatatgttataggtggaatcgttaaaggtgacacgtgtaccgacgcactagagagtttatcagaagatggatggatgaagcatcaacgtcttccaataaaaatgtccaatatgtcgacgattgttcatgatggcaagatttatatatctggaggttacaacaatagtagtgtagttaatgtaatatcgaatctagtccttagctataattcgatatatgatgaatggaccaaattatcatcattaaacattcctagaattaatcccgctctatggtcagcgcataataaattatatgtaggaggaggaatatctgatgatgttcgaactaatacatctgagacatacgacaaagaaaaagattgttggacattggataatggtcacgtgttaccacgcaattatataatgtataaatgcgaaccgattaaacataaatatccattggaaaaaacacagtacacgaatgattttctaaagtatttggaaagttttataggtagttgatagaacaaaatacataattttgtaaaaataaatcactttttatactaatatgacacgattaccaatacttttgttactaatatcattagtatactctacaccttctcctcagacatctaaaaaaataggtgatgatgcaactctatcatgtaatcgaaataatacaaatgactacgttgttatgagtgcttggtataaggagcccaattccattattcttttagctgctaaaagcgacgtcttgtattttgataattataccaaggataaaatatcttacgactctccatacgatgatctagttacaactatcacaattaaatcattgactgctagagatgccggtacttatgtatgtgcattctttatgacatcgcctacaaatgacactgataaagtagattatgaagaatactccacagagttgattgtaaatacagatagtgaatcgactatagacataatactatctggatctacacattcaccggaaactagttctgagaaacctgattatatagataattctaattgctcgtcggtattcgaaatcgcgactccggaaccaattactgataatgtagaagatcatacagacaccgtcacatacactagtgatagcattaatacagtaagtgcatcatctggagaatccacaacagacgagactccggaaccaattactgataaagaagaagatcatacagtcacagacactgtctcatacactacagtaagtacatcatctggaattgtcactactaaatcaaccaccgatgatgcggatctttatgatacgtacaatgatacagtaccaccaactactgtaggcggtagtacaacctctattagcaattataaaaccaaggactttgtagaaatatttggtattaccgcattaattatattgtcggccgtggcaatattctgtattacatattatatatataataaacgttcacgtaaatacaaaacagagaacaaagtctagatttttgacttacataaatgtctgggatagtaaaatctatcatattgagcgggccatctggtttaggaaagacagccatagccaaaagactatgggaatatatttggatttgtggtgtcccataccactagatttcctcgtcctatggaacgagaaggtgtcgattaccattacgttaacagagaggccatctggaagggaatagccgccggaaactttctagaacatactgagtttttaggaaatatttacggaacttctaaaacagctgtgaatacagcggctattaataatcgtatttgtgtgatggatctaaacatcgatggcgttagaagtcttaaaaatacgtacctaatgccttactcggtgtatataagacctacctctcttaaaatggttgagaccaagcttcgtcgtagaaacactgaagcggatgatgagattcatcgtcgtgtgatgttggcaaaaactgacatggatgaggcaggtgaagccggtctattcgacactattatcattgaagatgatgtgaatttagcatatagtaagttaattcagatactacaggaccgtattagaatgtattttaacactaattagagacttaagacttaaaacttgataattaataatataactcgtttttatatgtggctatttcaacgtctaatgtattagttaaatattaaaacttaccacgtaaaacttaaaatttaaaatgatatttcattgacagatagatcacacattatgaactttcaaggacttgtgttaactgacaattgcaaaaatcaatgggtcgttggaccattaataggaaaaggtggattcggtagtatttatactactaatgacaataattatgtagtaaaaatagagcccaaagctaacggatcattatttaccgaacaggcattttatactagagtacttaaaccatccgttatcgaagaatggaaaaaatctcacaatataaagcacgtaggtcttatcacgtgcaaggcatttggtctatacaaatccattaatgtggaatatcgattcttggtaattaatagattaggtgtagatctagatgcggtgatcagagccaataataatagattaccaaaaaggtcggtgatgttgatcggaatcgaaatcttaaataccatacaatttatgcacgagcaaggatattctcacggagatattaaagcgagtaatatagtcttagatcaaatagataagaataaattatatctagtggattacggattggtttctaaattcatgtctaatggcgaacatgttccatttataagaaatccaaataaaatggataacggtactctagaatttacacctatagattcgcataaaggatacgttgtatctagacgtggagatctagaaacacttggatattgtatgattagatggttgggaggtatcttaccatggactaagatatctgaaacaaagaattgtgcattagtaagtgccacaaaacagaaatatgttaacaatactgcgactttgttaatgaccagtttgcaatatgcacctagagaattgctgcaatatattaccatggtaaactctttgacatattttgaggaacccaattacgacaagtttcggcacatattaatgcagggtgtatattattaagtgtggtgtttggtcgataaaaattaaaaaataacttaatttattattgatctcgtgtgtacaaccgaaatcatggcgatgttttacgcacacgctctcggtgggtacgacgagaatcttcatgcctttcctggaatatcatcgactgttgccaatgatgtcaggaaatattctgttgtgtcagtttataataacaagtatgacattgtaaaagacaaatatatgtggtgttacagtcaggtgaacaagagatatattggagcactgctgcctatgtttgagtgcaatgaatatctacaaattggaaatccgatccatgatcaagaaggaaatcaaatctctatcatcacatatcgccacaaaaactactatgctctaagcggaatcgggtacgagagtctagacttgtgtttggaaggagtagggattcatcatcacgtacttgaaacaggaaacgctgtatatggaaaagttcaacatgattattctactatcaaagagaaggccaaagaaatgagtgcacttagtccaggacctatcatcgattaccacgtctggataggagattgtatctgtcaagttactgctgtggacgtacatggaaaggaaattatgaaaatgagattcaaaaagggtgcggtgcttccgatcccaaatctggtaaaagttaaacttggggagaatgatacagaaaatctttcttctactatatcggcgacaccatcgaggtaaccacctctctggaagacagcgtgaataatgtactcatgaaacgtttggaaactatacgccatatgtggtctgttgtatatgatcattttgatattgtgaatggtaaagaatgctgttatgtgcatacgcatttgtctaatcaaaatcttataccgagtactgtaaaaacaaatttgtacatgaagactatgggatcatgcattcaaatggattccatggaagctctagagtatcttagcgaactgaaggaatcaggtggatggagtcccagaccagaaatgcaggaatttgaatatccagatggagtggaagacactgaatcaattgagagattggtagaggagttcttcaatagatcagaacttcaggctggtgaatcagtcaaatttggtaattctattaatgttaaacatacatctgtttcagctaagcaactaagaacacgtatacggcagcagcttccttctatactctcatcttttaccaacacaaagggtggatatttgttcattggagttgataataatacacacaaagtatttggattcacggtgggttacgactacctcagactgatagagaatgatatagaaaagcatatcaaaagactttgtgttgtgtatttctgtgagaagaaagaggacatcaagtacgcgtgtcgattcatcaaggtatataaacctggggatgaggctacctcgacatacgtgtgcgctatcaaagtggaaagatgctgttgtgctgtgtttgcagattggccagaatcatggtatatggatactaatggtatcaagaagtattctccagatgaatgggtgtcacatataaaattttaattaatgtaactatagagaacaaataataaggttgtaatatcatatagacaataactaacaattaattagtaactgttatctcttttttaattaaccaactaactatatacctattaatacatcgtaattatagttcttaacatctattaatcattaattcgcttctttaattttttataaactaacattgttaattgaaaagggataacatgttacagaatataaattatatatggatttttttaaaaaggaaatacttgactggagtatatatttatctcttcattatatagcacgcgtgttttccaatttttccacatcccatataatacaggattataatctcgttcgaacatacgagaaagtggataaaacaatagttgattttttatctaggttgccaaatttattccatattttagaatatggggaaaatattctacatatttattctatggatgatgctaatacgaatattataattttttttctagatagagtattaaatattaataagaacgggtcatttatacacaatctcgggttatcatcatccattaatataaaagaatatgtatatcaattagttaataatgatcatccagataataggataagactaatgcttgaaaatggacgtagaacaagacattttttgtcctatatatcagatacagttaatatctatatatgtattttaataaatcatggattttatatagatgccgaagacagttacggttgtacattattacatagatgtatatatcactataagaaatcagaatcagaatcatacaatgaattaattaagatattgttaaataatggatcagatgtagataaaaaagatacgtacggaaacacaccttttatcctattatgtaaacacgatatcaacaacgtggaattgtttgagatatgtttagagaatgctaatatagactctgtagactttaatagatatacacctcttcattatgtctcatgtcgtaataaatatgattttgtaaagttattaatttctaaaggagcaaatgttaatgcgcgtaataaattcggaactactccattttattgtggaattatacacggtatctcgcttataaaactatatttggaatcagacacagagttagaaatagataatgaacatatagttcgtcatttaataatttttgatgctgttgaatctttagattatctattatccagaggagttattgatattaactatcgtactatatacaacgaaacatctatttacgacgctgtcagttataatgcgtataatacgttggtctatctattaaacaaaaatggtgattttgagacgattactactagtggatgtacatgtatttcggaagcagtcgcaaacaacaacaaaataataatggaagtactattgtctaaacgaccatctttgaaaattatgatacagtctatgatagcaattactaaacataaacagcataatgcagatttattgaaaatgtgtataaaatatactgcgtgtatgaccgattatgatactcttatagatgtacagtcgctacagcaatataaatggtatattttaagatgtttcgatgaaatagatatcatgaagagatgttatataaaaaataaaactgtattccaattagttttttgtatcaaagacattaatactttaatgagatacggtaaacatccttctttcgtgaaatgcactagtctcgacgtatacggaagtcgtgtacgtaatatcatagcatctattagatatcgtcagagattaattagtctattatccaagaagctggatcctggagataaatggtcgtgttttcctaacgaaataaaatataaaatattggaaaactttaacgataacgaactatccacatatctaaaaatcttataaacattattaaaatataaaatctaagtaggataaaatcacactacatcattgtttccttttagtgctcgacagtgtatactatttttaacgctcataaataaaaatgaaaacgatttccgttgttacgttgttatgcgtactacctgctgttgtttattcaacatgtactgtacccactatgaataacgctaaattaacgtctaccgaaacatcgtttaatgataaccagaaagttacgtttacatgtgatcagggatatcattctttggatccaaatgctgtctgtgaaacagataaatggaaatacgaaaatccatgcaaaaaaatgtgcacagtttctgattatgtctctgaactatataataaaccgctatacgaagtgaattccaccatgacactaagttgcaacggcgaaacaaaatattttcgttgcgaagaaaaaaatggaaatacttcttggaatgatactgttacgtgtcctaatgcggaatgtcaacctcttcaattagaacacggatcgtgtcaaccagttaaagaaaaatactcatttggggaatatatgactatcaactgtgatgttggatatgaggttattggtgcttcgtacataagttgtacagctaattcttggaatgttattccatcatgtcaacaaaaatgtgatatgccgtctctatctaacggattaatttccggatctacattttctatcggtggcgttatacatcttagttgtaaaagtggttttacactaacggggtctccatcatccacatgtatcgacggtaaatggaatcccgtactcccaacatgtgtacgatctaacgaaaaatttgatccagtggatgatggtcccgacgatgagacagatttgagcaaactctcgaaagacgttgtacaatatgaacaagaaatagaatcgttagaagcaacttatcatataatcatagtggcgttgacaattatgggcgtcatatttttaatctccgttatagtattagtttgttcctgtgacaaaaataatgaccaatataagttccataaattgctaccgtgaatataaatccgttaaaataattaataatttaataacgaacaagtatcaaaagattaaagacttatagctagaatcaattgagatgtcttcttcagtggatgttgatatctacgatgccgttagagcatttttactcaggcactattataacaagagatttattgtgtatggaagaagtaacgccatattacataatatatacaggctatttacaagatgcgccgttataccgttcgatgatatagtacgtactatgccaaatgaatcacgtgttaaacaatgggtgatggatacacttaatggtataatgatgaatgaacgcgatgtttctgtaagcgttggcaccggaatactattcatggaaatgtttttcgattacaataaaaatagtatcaacaatcaactaatgtatgatataattaatagcgtatctataattctagctaatgagagatatagaagcgcttttaacgacgatggtatatacatccgtagaaatatgattaacaagttgtacggatacgcatctctaactactattggcacgatcgctggaggtgtttgttattatctgttgatgcatctagttagtttgtataaataattatttcaatatactagttaaaattttaagattttaaatgtataaaaaactaataacgtttttatttgtaataggtgcattagcatcctattcgaataatgagtacactccgtttaataaactgagtgtaaaactctatatagatggagtagataatatagaaaattcatatactgatgataataatgaattggtgttaaattttaaagagtacacaatttctattattacagagtcatgcgacgtcggatttgattccatagatatagatgttataaacgactataaaattattgatatgtataccattgactcgtctactattcaacgcagaggtcacacgtgtagaatatctaccaaattatcatgccattatgataagtacccttatattcacaaatatgatggtgatgagcgacaatattctattactgcagagggaaaatgctataaaggaataaaatatgaaataagtatgatcaacgatgatactctattgagaaaacatactcttaaaattggatctacttatatatttgatcgtcatggacatagtaatacatattattcaaaatatgatttttaaaaatttaaaatatattatcacttcagtgacagtagtcaaataacaaacaacaccatgagatatattataattctcgcagttttgttcattaatagtatacacgctaaaataactagttataagtttgaatccgtcaattttgattccaaaattgaatggactggggatggtctatacaatatatcccttaaaaattatggcatcaagacgtggcaaacaatgtatacaaatgtaccagaaggaacatacgacatatccgcatttccaaagaatgatttcgtatctttctgggttaaatttgaacaaggcgattataaagtggaagagtattgtacgggactatgcgtcgaagtaaaaattggaccaccgactgtaacattgactgaatacgacgaccatatcaatttgtacatcgagcatccgtatgctactagaggtagcaaaaagattcctatttacaaacgcggtgacatgtgtgatatctacttgttgtatacggctaacttcacattcggagattctaaagaaccagtaccatatgatatcgatgactacgattgcacgtctacaggttgcagcatagactttgtcacaacagaaaaagtgtgcgtgacagcacagggagccacagaagggtttctcgaaaaaattactccatggagttcgaaagtatgtctgacacctaaaaagagtgtatatacatgcgcaattagatccaaagaagatgttcccaatttcaaggacaaaatggccagagttatcaagagaaaatttaatacacagtctcaatcttatttaactaaatttctcggtagcacatcaaatgatgttaccacttttcttagcatgcttaacttgactaaatattcataactaatttttattaatgatacaaaaacgaaataaaactgcatattatacactggttaacgcccttataggctctaaccattttcaagatgaggtccctgattatagtccttctgttcccctctatcatctactccatgtctattagacgatgtgagaagactgaagaggaaacatggggattgaaaatagggttgtgtataattgccaaagatttctatcccgaaagaactgattgcagtgttcatctcccaactgcaagtgaaggattgataactgaaggcaatggattcagggatatacgaaacaccgataaattataaaaaaagcaatgtgtccgctgtttccgttaataatactattttcgtaactggcggattattcataaataactctaatagcacgatcgtggttaacaatatggaaaaacttgacatttataaagacaaacaatggtcgattatagaaatgcctatggctagggtatatcacggcatcgactcgacatttggaatgttatattttgccggaggtctatccgttaccgaacaatatggtaatttagagaaaaacaacgagatatcttgttacaatcctagaacgaataagtggtttgatatttcatatactatttataagatatccatatcatcattgtgtaaactaaataacgtcttctatgtatttagtaaggacattggatatgtggaaaagtatgatggtgcatggaagttagtacatgatcgtctccccgctataaaggcattatcaacttctccttattgattgaaaatgaaaatataaatagtttttatgtatagcagtattaccctatagttttattgcttactactaacatggatacagatgttacaaatgtagaagatatcataaatgaaatagatagagagaaagaagaaatactaaaaaatgtagaaattgaaaataataaaaacattaacaagaatcatcccaatgaatatattagagaagcactcgttattaataccagtagtaatagtgattccattgataaagaagttatagaatgtatcagtcacgatgtaggaatatagatcatatctactaatttttataatcgatacaaaacataaaaaacaactcgttattacatagcaggcatggaatccttcaagtattgttttgataacgatggcaagaaatggattatcggaaatactttatattctggtaattcaatactctataaggtcagaaaaaatttcactagttcgttctacaattacgtaatgaagatagatcacaaatcacacaagccattgttgtctgaaatacgattctatatatctgtattggatcctttgactatcgacaactggacacgggaacgtggtataaagtatttggctattccagatctgtatggaattggagaaaccgatgattatatgttcttcgttataaagaattcgggaagagtattcgccccaaaggatactgaatcagtcttcgaagcatgcgtcactatgataaacacgttagagtttatacactctcgaggatttacccatggaaaaatagaaccgaggaatatactgattagaaataaacgtctttcactaattgactattctagaactaacaaactatacaagagtggaaactcacatatagattacaacgaggacatgataacttcaggaaatatcaattatatgtgtgtagacaatcatcttggagcaacagtttcaagacgaggagatttagaaatgttgggatattgcatgatagaatggttcggtggcaaacttccatggaaaaacgaaagtagtataaaagtaataaaacaaaaaaaagaatataaaaaatttatagctactttctttgaggactgttttcctgaaggaaatgaacctctggaattagttagatatatagaattagtatacacgttagattattctcaaactcctaattatgacagactacgtaaactgtttatacaagattgaaattatattcttttttttatagagtgtggtagtgttacggatatctaatattaatattagactatctctatcgcgctacacgaccaatatcgattactatggatatcttctatgaaaggagagaatgtatttatttctccagcgtcaatctcgtcagtattgacaatactgtattatggagctaatggatccactgctgaacagctatcaaaatatgtagaaacggaggagaacacggataaggttagcgctcagaatatctcattcaaatccatgaataaagtatatgggcgatattctgccgtgtttaaagattcctttttgagaaaaattggcgataagtttcaaactgttgacttcactgattgtcgcactatagatgcaatcaacaagtgtgtagatatctttactgaggggaaaatcaatccactattggatgaaccattgtctcctagcaattagtgccgtatactttaaagcaaaatggttgacgccattcgaaaaggaatttaccagtgattatcccttttacgtatctccgacggaaatggtagacgtaagtatgatgtctatgtacggcaaggcatttaatcacgcatctgtaaaagaatcattcggcaacttttcaatcatagaactgccatatgttggagatactagtatgatggtcattcttccagacaagattgatggattagaatccatagaacaaaatctaacagatacaaattttaagaaatggtgtgactttatggatgctatgtttatagatgttcacattcccaagtttaaggtaacaggctcgtataatctggtggatactctagtaaagtcaggactgacagaggtgttcggttcaactggagattatagcaatatgtgtaatttagatgtgagtgtcgacgctatgatccacaaaacgtatatagatgtcaatgaagagtatacagaagcagctgcagcaacttctgtactagtggcagactgtgcatcaacaattacaaatgagttctgtgcagatcatccgttcatctatgtgattaggcatgttgatggaaaaattcttttcgttggtagatattgctctccgacaactaattgttaaccattttttttaaaaaaaatagaaaaaacatgtggtattagtgcaggtcgttgttcttccaattgcaattggtaagatgacggccaactttagtacccacgtcttttcaccacagcactgtggatgtgacagactgaccagtattgatgacgtcaaacaatgtttgactgaatatatttattggtcgtcctatgcataccgcaacaggcaatgcgctggacaattgtattccacactcctctcttttagagatgatgcggaattagtgttcatcgacattcgcgagctggtaaaaaatatgccgtgggatgatgtcaaagattgtacagaaatcatccgttgttatataccggatgagcaaaaaaccatcagagagatttcggccatcatcggactttgtgcatatgctgctacttactggggaggtgaagaccatcccactagtaacagtctgaacgcattgtttgtgatgcttgagatgctaaattacgtggattataacatcatattccggcgtatgaattgatgagttgtacatcttgacattttctttcttctcttctccctttcttctcttctcccttcctccctcttctccctttcccagaaacaaacttttttacccactataaaataaaatgagtatactacctgttatatttctttctatatttttttattcttcattcgttcagacttttaacgcgtctgaatgtatcgacaaagggcaatattttgcatcattcatggagttagaaaacgagccagtaatcttaccatgtcctcaaataaatacgctatcatccggatataatatattagatattttatgggaaaaacgaggagcggataatgatagaattataccgatagataatggtagcaatatgctaattctgaacccgacacaatcagactctggtatttatatatgcattaccacgaacgaaacctactgtgacatgatgtcgttaaatttgacaatcgtgtctgtctcagaatcaaatatagattttatctcgtatccacaaatagtaaatgagagatctactggcgaaatggtatgtcccaatattaatgcatttattgctagtaacgtaaacgcagatattatatggagcggacatcgacgccttagaaataagagacttaaacaacggacacctggaattattaccatagaagatgttagaaaaaatgatgctggttattatacatgtgttttagaatatatatacggtggcaaaacatataacgtaaccagaattgtaaaattagaggtacgggataaaataataccttctactatgcaattaccagatggcattgtaacttcaataggtagtaatttgactattgcatcgttgagacctcccacaacggatgcagacgtcttttggataagtaatggtatgtattacgaagaagatgatggggacggaaacggtagaataagtgtagcaaataaaatctatatgaccgataagagacgtgttattacatcccggttaaacattaatcctgtcaaggaagaagatgctacaacgtttacgtgtatggcgtttactattcctagcatcagcaaaacagttactgttagtataacgtgaatgtatgttgttacatttccatgtcaattgagtttataagaatttttatacattatcttccaacaaacaattgacgaacgtattgctatgattaactcccacgatactatgcatattattaatcattaacttgcagactatacctagtgctattttgacatactcatgttcttgtgtaattgcggtatctatattattaaagtacgtaaatctagctatagttttattatttaattttagataatataccgtctccttatttttaaaaattgccacatcctttattaaatcatgaatgggaatttctatgtcatcgttagtatattgtgaacaacaagagcagatatctataggaaagggtggaatgcgatacattgatctatgtagttttaaaacacacgcgaactttgaagaatttatataaatcattccatcgatacatccttctatgttgagatgtatatatccaggaattcgtttattaatatcgggaaatgtataaactaaaacattgcccgaaagcggtgcctctatctgcgttatatccgttcttaacttacaaaatgtaaccaatacctttgcatgacttgttttgttcggcaacgttagtttaaacttgacgaatggattaattacaatagcatgatccgcgcatctattaagtttttttactttaacgcccttgtatgtttttacagagactttatctaaatttctagtacttgtatgtgttataaatataacgggatatagaaccgaatcacctaccttagatacccaattacattttatcagatccagataataaacaaattttgtcgccctaactaattctatattgttatatattttacaattggttatgatatcatgtaataacttggagtctaacgcgcatcgtcgtacgtttatacaattgtgatttagtgtagtatatctacacatgtatttttccgcactatagtattctggactagtgataaaactatcgttatatctgtcttcaatgaactcatcgagatattgctctctgtcatattcatacacctgcataaactttctagacatcttacaatccgtgttattttaggatcatatttacatatttacgggtatatcaaagatgttagattagttaatgggaatcgtctataataatgaatattaaacaattatatgaggacttttaccacaaagcatcataaaaatgagtcgtcgtctgatttatgttttaaatatcaaccgcgaatcaactcataaaatacaagagaatgaaatatatacatattttagtcattgcaatatagaccatacttctacagaacttgattttgtagttaaaaactatgatctaaacagacgacaacctgtaactgggtatactgcactacactgctatttgtataataattactttacaaacgatgtactgaagatattattaaatcatggagtggatgtaacgatgaaaaccagtagcggacgtatgcctgtttatatattgcttactagatgttgtaatatttcacatgatgtagtgatagatatgatagacaaagataaaaaccacttatcgcatagagactattccaacctactactagagtatataaaatctcgttacatgttattaaaggaagaggatatcgatgagaacatagtatccactttattagataagggaatcgatcctaactttaaacaagacggatatacagcgttacattattatttgtgtctcgcacacgtttataaaccaggtgagtgtagaaaaccgataacgataaaaaaggccaagcgaattatttctttgtttatacaacatggagctaatctaaacgcgttagataattgtggtaatacaccattccatttgtatcttagtattgaaatgtgtaataatattcatatgactaaaatgctgttgacttttaatccgaatttcaaaatatgtaataatcatggattaacgcctatactatgttatataacttccgactacatacaacacgatattcttgttatgttaatacatcactatgaaacaaatgttggagaaatgccgatagatgagcgtcgtataatcgtattcgagtttatcaaaacatattctacacgtccggcagattcgataacttatttgatgaataggtttaaaaatataaatatttatacccgctatgaaggaaagacattattacacgtagcatgtgaatataataatacacacgtaatagattatcttatacgtatcaacggagatataaatgcgttaaccgacaataacaaacacgctatccaactcattatagataacaaagaaaattccccatataccattaattgtttactgtatatacttagatatattgtagataagaatgtgataagatcgttggtggatcaacttccatctctacctatctttcgtcgcttatcatactagtcatatcctaaatgttgatcatattccaccaaatgattgtgaaagagattgagattaaatcgtctaacaaacaattagtttttatgacattaacatataataaataaattaatcattattgacttaacgatgacgaaagttatcatcatcttaggattcttgattattaatacaaattcattgtctatgaaatgtgaacaaggtgtctcatattataattcacaagaattaaagtgttgtaaactatgtaagccaggaacatattcagatcatcgatgtgataaatacagcgataccatttgtggacattgtccgagtgacacattcacgtcaatatataatcgttctccttggtgtcatagttgtagaggtccatgtggtactaatcgagtagaggtcacaccttgtacacctaccacaaatagaatctgtcattgtgactcgaatagttattgtctccttaaagcttttgatggtaactgtgttacatgtgctcctaaaacaaaatgtggtcgtgggtatggaaagaaaggagaagatgaaatgggtaataccatttgtaagaaatgtcggaagggtacttattcagatattgtatctgactctgatcaatgtaaaccaatgacaagataagacttactcgcatctactggatagacataaaatatcctcctcgtaataatgaaatataatatacactaattattaatatcaataacaatcgagtattaatatataggtcatttttaaatcccttttgggttccgtcccaaacggcgtttcggtctgcgtcgccgccatggccatgccgagcctctccgcgtgctcctccatcgaggacgacttcaactatggcagctcggtggcgtctgccagcgtgcacatacgaatggcatttctaagaaaagtctacggtatcctttgtctacaatttcttttaacaacggcaacaactgcagtatttttatactttgactgcatgcggacatttatacaagggagtcctgttctaatattggcatcaatgttcggatctataggcttgattttcgcattgactttacacagacataaacatcccctgaatctgtacctgctttgtggatttacactgtcggaatctctaacgctggcctctgttgttactttctatgatgtgcatgtcgttatgcaagctttcatgctgactactgcagcgtttcttgctctgactacatatactctacaatcaaagagagatttcagtaaacttggagcaggattgtttgctgctttgtggattttaattttgtcaggactcttggggatatttgtgcaaaatgagacagtgaagctggtcctgtctgcttttggggcccttgtattctgtggattcattatctatgacacgcactcactaatacataagctctcgcctgaagagtatgtgttagcctctatcaatctctacttggatatcatcaatctgttcttgcatctgttgcagcttttggaagtatctaataagaaataaagtttaaaatagaattaataaaaacatataggtcattttttaaacatggattggaaaccaaggtagttagttaatacacacaagatatatttttttcacatcatccacccatgggtaacaccaaggttgttagttaataatatacaagatattttttctcactctgatccatgtaaaccaaggacgagataagacactctcattcctcatctacaaccccattaaaaaatggaaattaaagccctctattagcatagacggctacaggtctaccatcaggttaaccttcgtctaccttcacaatggcctttccttgtgcccagttcagaccctgtcattgccacgctactaaggactccctgaataccgtggccgacgtcagacattgtctgactgaatacatcctgtgggtttctcatagatggacccatagagaaagcgcagggtctctctacaggcttctcatctctttcagaactgatgcaacggagctctttggtggtgagttgaaggattcacttccgtgggacaattgcgtggagatcattaaatgtttcatcagaaatgactccatgaaaaccgccgaagaacttcgtgcaatcattggactttgtactcaatcagctatcgtctctggaagagtcttcaacgataagtatatcgacatactacttatgctgcgaaagattctgaacgagaacgactatctcaccctcttggatcatatccgcactgctaaatactaaatctccttcatgctctctcactacactttttatcatcttatgaggaatgattgccttcgtgaaataggaataattagcaccagaatagctatggattattgtggtagagagtgcactattctatgtcgtctactggatgaagatgtgacgtacaaaaaaataaaaccagagattgaaacgtgtcacaacttatcaaaacatatagatagacgaggaaacaatgcgctacattgttacgtcttcaataaatgcgatacagacattaagattgttcggctgttactctctcgcggagtcgagagactttgtagaaacaacgaaggattaactccgctaggagcatacagtaagcatagatacgtcaaatctcagattgtgcatctactgatatccagctattcgaattcctctaacgaactcaagtcgaatataaatgatttcgatctgtattcggataatatcgacttacgtctgctaaaatacctaattgtggataaacggatacgtccgtccaagaatacgaattatgcaatcaatggtctcggattggtggatatatacgtaacgacgcctaatccgagaccagaagtattgctatggcttcttaaatcagaatgttacagcaccggttacgtatttcgtacctgtatgtacgacagtgatatgtgtaagaactctcttcattactatatatcgtctcatagagaatctcaatctctatccaaggatgtaattaaatgtttgatcgataacaatgtttccatccatggcagagacgaaggaggatctttacccatccaatactactggtcttgctcaaccatagatatagagattgttaaattattaataaaggatgtggacacgtgtagagtatacgacgtcagccctatattagaggcgtattatctaaacaagcgatttagagtaaccccatataatgtagacatggaaatcgttaatcttcttattgagagacgtcatactcttgtcgacgtaatgcgtagtattacttcgtacgattccagagaatataaccactacatcatcgataacattctaaagagatttagacaacaggatgtacaagccatgttgataaactacttacattacggcgatatggtaagtatacctatcattcaatgcatgttggataacggagcaaccatggataagacgacggacaacaactatcctctacacgactactttgttaataataatctcgtcgatgtaaacgtcgtaaggtttatcgtggaaaatatggacacgcggctgtaaatcacatatctaacaatggccgtctatgtatgtacggtctgatattatcgagatttaataattgcgggtatcactgttatgaaaccatactgatagatgtatttgatatactaagcaagtacatggatgatatagatatgatcgataactctactatattacgcggtcgatgtcaataatatacaatttgcaaagcggttattggaatatggagcgagtgtcacgctcgataatcaatacggccatccagaaaagcagttaccaaagagaaaacaaaacgaggatagttgatttattacttagctaccatcccactctagagactatgattgacgcatttaatagagatatacgctatctatatcctgaaccattattcgcctgtatcagatacgccttaatcctagatgatgattttccttctaaagtaaagtatgatatctccggtcgtcataaggaactaaagcgctatagagtagacattaatagaatgaagaatgtctacatatcaggcgtctccatgtttgatatattctttaaacgaagcaaacgccacaaattgagatacgcaaagaatccgacatcaaatggtacaaaaaagaactaacgtccatcattacagaaactgtaaagaacaatgagaggatcgactccatagtggacaacattaatacagacgataacttgatttcgaaattacccatggagatactttattactccattaaataatttatcatggagcgataatgtcctgtttcatttgtttccatgacatattacaaaatcgattccgtccaagatgataaaaacatttaccggcatcataaacacggagtttattttatatgtctcgcataaacattactaaaaaaatatattgttctgtttttctttcacatctttaattatgaaaaagtaaatcattatgagatggacgagattgtacgcatcgttcgcgacagtatgtggtacatacctaacgtatttatggacgacggtaagaatgaaggtcacgtttctgtcaacaatgtctgtcatatgtattttacgttctttgatgtggatacatcgtctcatctgtttaagctagttattaaacactgcgatctgaataaacgaggtaactctccattacattgctatacgatgaatacacgatttaatccatctgtattaaagatattgttacaccacggcatgcgtaactttgatagcaaggatgaccactatcaatcgataacaagatctttgatatactaacggacaccattgatgactttagtaaatcatccgatctattgctgtgttatcttagatataaattcaatgggagcttaaactattacgttctgtacaaaggatccgaccctaattgcgccgacgaggatgaactcacttctcttcattactactgtaaacacatatccacgttctacgaaagcaattattacaagttaagtcacactaagatgcgagccgagaagcgattcatctacgcgataatagattatggagcaaacattaacgcggttacacacttaccttcaacagtataccaaacatagtcctcgtgtggtgtatgctcttttatctcgaggagccgatacgaggatacgtaataatcttgattgtacacccatcatggaacgattgtgcaacaggtcatattctcataatgttactcaattggcacgaacaaaaggaagaaggacaacatctactttatctattcataaaacataatcaaggatacactctcaatatactacggtatctattagataggttcgacattcagaaagacgaatactataataccgcctttcaaaattgtaacaacaatgttgcctcatacatcggatacgacatcaaccttccgactaaagacggtattcgacttggtgtttgaaaacagaaacatcatatacaaggcggatgttgtgaatgacatcatccaccacagactgaaagtatctctacctatgattaaatcgttgttctacaagatgtctctccctacgacgattactacgtaaaaaagatactagcctactgcctattaagggacgagtcattcgcggaactacatagtaaattctgtttaaacgaggactataaaagtgtatttatgaaaaatatatcattcgataagatagattccatcatcgtgacataagtcgcctcaaagagattcgaatctccgacaccgacctgtatacggtatcacagctatcttaaagccatacattcagacagtcacatttcatttcccatgtacgacgatctcatagaacagtgccatctatcgatggagcgtaaaagtaaactcgtcgacaaagcactcaataaattagagtctaccatcggtcaatctagactatcgtatttgcctccggaaattatgcgcaatatcatctaaacagtatgttgtacggaaagaaccattacaaatattatccatgatagaaagaaaatatctatatgattggagaagtaggaaacaggaacaagacaacgattactacattattaaatcatgaagtccgtattatactcgtatatattgtttctctcatgtataataataaacggaagagatatagcaccgcatgcaccatccgatggaaagtgtaaagacaacgaatacaaacgccataatttgtgtccgggaacatacgcttccagattatgcgatagcaagactaacacacgatgtacgccgtgtggttcgggtaccttcacatctcgcaataatcatttacccgcttgtctaagttgtaacggaagacgcgatcgtgtaacacgactcacaatagaatctgtgaatgctctcccggatattattgtcttctcaaaggatcatccggatgcaaggcatgtgtttcccaaacaaaatgtggaataggatacggagtatccggagacgtcatctgttctccgtgtggtctcggaacatattctcacaccgtctcttccgcagataaatgcgaacccgtacccagaaatacgtttaactatatcgatgtggaaattaacctgtatccagttaacgacacgtcgtgtactcggacgaccactaccggtctcagcgaatccatctcaacgtcggaactaactattactatgaatcataaagactgtaatcccgtctttcgtgatggatacttctccgttcttaataaggtagcaacttcaggattctttacaggagaaaggtgtgcactctgaatttcgagattaaatgcaataacaaagattcttcctccaaacagttaacgaaagcaaagaatgatactatcatgccgcattcggagacagtaactctagtgggcgacatctatatactatatagtaataccaatactcaagactacgaaactgatacaatctcttatcatgtgggtaatgttctcgatgtcgatagccatatgcccggtagttgcgatatacataaactgatcactaattccaaacccacccactttttatagtaagtttttcacccataaataataaatacaataattaatttctcgtaaaagtagaaaatatattctaatttattgcacggtaaggaagtagaatcataaagaacagtactcaatcaatagcaattatgaaacaatatatcgtcctggcatgcatgtgcctggcggcagctgctatgcctgccagtcttcagcaatcatcctcatcctcctcctcgtgtacggaagaagaaaacaaacatcatatgggaatcgatgttattatcaaagtcacaaagcaagaccaaacaccgaccaatgataagatttgccaatccgtaacggaaattacagagtccgagtcagatccagatcccgaggtggaatcagaagatgattccacatcagtcgaggatgtagatcctcctaccacttattactccatcatcggtggaggtctgagaatgaactttggattcaccaaatgtcctcagattaaatccatctcagaatccgctgatggaaacacagtgaatgctagattgtccagcgtgtccccaggacaaggtaaggactctcccgcgatcactcatgaagaagctcttgctatgatcaaagactgtgaagtgtctatcgacatcagatgtagcgaagaagagaaagacagcgacatcaagacccatccagtactcgggtctaacatctctcataagaaagtgagttacgaagatatcatcggttcaacgatcgtcgatacaaaatgcgtcaagaatctagagtttagcgttcgtatcggagacatgtgcaaggaatcatctgaacttgaggtcaaggatggattcaagtatgtcgacggatcggcatctgaaggtgcaaccgatgatacttcactcatcgattcaacaaaactcaaagcgtgtgtctgaatcgataactctattcatctgaaattggatgagtagggttaatcgaacgattcaggcacaccacgaattaaaaaagtgtaccggacactatattccggtttgcaaaacaaaaatgttcttaactacattcacaaaaagttacctctcgcgacttcttctttttctgtctcaatagtgtgatacgattatgacactattcctattcctattcctatttcctttcagagtatcacaaaaatattaaacctctttctgatggtctcataaaaaaagttttacaaaaatatttttattctctttctctctttgatggtctcataaaaaaagttttacaaaaatatttttattctctttctctctttgatggtctcataaaaaaagttttacaaaaatatttttattctctttctctctttgatggtctcataaaaaaagttttacaaaaatatttttattctctttctctctttgatggtctcataaaaaaagttttacaaaaatatttttattctctttctctctttgatggtctcataaaaaaagttttacaaaaatatttttattctctttctctctttgatggtctcataaaaaaagttttacaaaaatatttttattctctttctctctttgatggtctcataaaaaaagttttacaaaaatatttttattctctttctctctttgatggtctcataaaaaaagttttacaaaaatatttttattctctttctctctttgatggtctcataaaaaaagttttacaaaaatatttttattctctttctctctttgatggtctcataaaaaaagttttacaaaaatatttttattctctttctctctttgatggtctcataaaaaaagttttacaaaaatatttttattctctttctctctttgatggtctcataaaaaaagttttacaaaaatatttttattctctttctctctttgatggtctcataaaaaaagttttacaaaaatatttttattctctttctctctttgatggtctcataaaaaaagttttacaaaaatatttttattctctttctctctttgatggtctcataaaaaaagttttacaaaaatatttttattctctttctctctttgatggtctcataaaaaaagttttacaaaaatatttttattctctttctctctttgatggtctcataaaaaaagttttacaaaaatatttttattctctttctctctttgatggtctcataaaaaaagttttaatcg

(The sequence listing continues in the following parts.)
